(19) United States
(12) Patent Application Publication
(10) Pub. No.: US 2025/0082779 A1
(43) Pub. Date: Mar. 13, 2025

(54) ADENO-ASSOCIATED VIRUS COMPOSITIONS HAVING INCREASED BRAIN ENRICHMENT

(71) Applicant: Capsida, Inc., Thousand Oaks, CA (US)

(72) Inventors: Nicholas C. Flytzanis, Thousand Oaks, CA (US); Nicholas S. Goeden, Thousand Oaks, CA (US); Troy E. Sandberg, Thousand Oaks, CA (US); Brandon G. Wheeler, Thousand Oaks, CA (US)

(21) Appl. No.: 18/284,409

(22) PCT Filed: Apr. 13, 2022
(86) PCT No.: PCT/US2022/024609

§ 371 Date: Sep. 27, 2023

Related U.S. Application Data
(60) Provisional application No. 63/295,028, filed on Dec. 30, 2021.
(60) Provisional application No. 63/174,436, filed on Apr. 13, 2021.

(51) Int. Cl. A61K 48/00; C07K 14/005; C12N 15/86

(52) U.S. Cl. CPC A61K 48/0058; C07K 14/005; C12N 15/86; C12N 2750/14122; C12N 2750/14143; C12N 2750/14145; C12N 2750/14152

(57) ABSTRACT

Described herein are compositions and kits comprising recombinant adeno-associated viruses (rAAVs) with increased transduction enrichment in the CNS. The rAAV compositions described herein encapsidate a transgene, such as a therapeutic nucleic acid. Gene therapy using the rAAVs is described. Also described are methods of treating CNS-related diseases and conditions.

### BACKGROUND

[0001] Recombinant adeno-associated viruses (rAAVs) are widely used as vectors for gene delivery in therapeutic applications because of their ability to transduce both dividing and non-dividing cells, their long-term persistence as episomal DNA in infected cells, and their low immunogenicity. These characteristics make them appealing for applications in therapeutic applications, such as gene therapy. However, there is a need to significantly improve the performance of existing AAV serotypes to selectively and efficiently express in distinct cell-types, upon systemic delivery to a subject. This need is especially acute when the AAV must be expressed in the central nervous system (CNS).

### SEQUENCE LISTING

[0002] This application contains a sequence listing which has been submitted in text format and is hereby incorporated by reference in its entirety. The sequence listing file named created on Apr. 26, 2024, is named, CAPS-014-01US-SEQ_ST25.txt, and is 1900 KB in size.

### SUMMARY OF THE INVENTION

[0003] Disclosed herein are rAAVs with engineered transduction into the capsid structure through iterative rounds of selection in non-human primates (NHPs), yielding variants having increased transduction when measured in the CNS.

[0004] The present invention provides rAAVs with widespread transduction to the CNS.

[0005] The present invention provides, in an aspect, a peptide insertion sequence comprising or consisting of an amino-acid sequence set forth in any one of Table 1, FIG. 1 and and/or Formulas I-VII.

[0006] Another aspect of the invention is a modified capsid protein wherein the AAV capsid protein, with a peptide insertion comprising or consisting of an amino-acid sequence set forth in any one of Table 1, FIG. 1 and and/or Formulas I-VII, is characterized by increased CNS transduction in a subject.

[0007] The present disclosure moreover includes pharmaceutical compositions comprising rAAVs with a peptide insertion comprising or consisting of an amino-acid sequence set forth in any one of Table 1, FIG. 1 and and/or Formulas I-VII, and a pharmaceutically acceptable excipient.

[0008] Aspects disclosed herein provide methods of treating a disease or condition in a subject comprising administering a therapeutically effective amount of a pharmaceutical formulation comprising the AAV capsid protein or the AAV capsid of the present disclosure. In some embodiments, the disease or the condition is a disease or a condition of the CNS, and brain of the subject. Relatedly, the invention includes use of the rAAVs in the manufacture of a medicament for treating or preventing the disease or medical condition.

[0009] Other aspects of the invention will be apparent from the detailed description and claims that follow.

### BRIEF DESCRIPTION OF THE FIGURES

[0010] The novel features of the invention are set forth with particularity in the appended claims. A better understanding of the features and advantages of the present invention will be obtained by reference to the following detailed description that sets forth illustrative embodiments, in which the principles of the invention are utilized, and the accompanying drawings of which:

[0011] FIG. 1 shows AAV capsid protein insertion and substitution amino acid sequences encoding the amino acid sequences which were found in the non-human primate CNS after two rounds of evaluation of engineered AAV libraries.

### DETAILED DESCRIPTION OF THE DISCLOSURE

[0012] In one aspect the disclosure provides rAAVs with high expression levels in the CNS.

[0013] In one aspect, the disclosure provides rAAVs with a peptide insertion and or substitution comprising or consisting of an amino-acid sequence set forth in any one of Table 1, FIG. 1 and and/or Formulas I-VII.

[0014] Aspects disclosed herein provide AAV capsids comprising an AAV capsid protein comprising an amino acid sequence of Formula I

(I)
(SEQ ID NO: 2)
X¹-N-X²-X³-X⁴-X⁵-X⁶

[0015] wherein X¹ is an amino acid selected from A, S, G, N, L, Y, H, D, E, Q, P, T and V; X² is an amino acid selected from Q, S, V, T, N, H and A; X³ is an amino acid selected from I, V and T; X⁴ is an amino acid selected from K and R; X⁵ is an amino acid selected from N, V, P, I, T, S, Q, A, L and G; and X⁶ is an amino acid selected from I, S, T, L, V, M, Y, F, A and N.

[0016] In some embodiments, the AAV capsid protein comprises an amino acid sequence of formula 1 wherein X⁴ is K.

[0017] In some embodiments, the AAV capsid protein comprises an amino acid sequence of formula I wherein X⁴ is R.

[0018] In some embodiments, the AAV capsid protein comprises an amino acid sequence of formula I wherein X³ is V.

[0019] In some embodiments, the AAV capsid protein comprises an amino acid sequence of formula I wherein X³ is T.

[0020] In some embodiments, the AAV capsid protein comprises an amino acid sequence of formula I wherein X³ is I.

[0021] In some embodiments, the AAV capsid protein comprises an amino acid sequence of formula I wherein X² is Q.

[0022] In some embodiments, the AAV capsid protein comprises an amino acid sequence of formula I wherein X¹ is an amino acid selected from A, S, G, N, L, Y, D, E, Q, P, T and V.

[0023] In some embodiments, the AAV capsid protein comprises an amino acid sequence of formula I wherein X³ is T or I when X¹ is A.

[0024] In some embodiments, the AAV capsid protein comprises an amino acid sequence of formula I wherein X³ is T or I when X¹ is N.

[0025] In some embodiments, the AAV capsid protein comprises an amino acid sequence of formula I wherein X² is an amino acid selected from Q, S, V, T, N, H and A when X¹ is D.

[0026] In some embodiments, the AAV capsid protein comprises an amino acid sequence of formula I wherein X² is an amino acid selected from Q, S, T, N, H and A.

[0027] In some embodiments, the AAV capsid protein comprises an amino acid sequence of formula I wherein X⁶ is an amino acid selected from I, S, T, L, V, Y, A and N.

[0028] Aspects disclosed herein provide AAV capsids comprising an AAV capsid protein comprising an amino acid sequence of Formula III

(II)
(SEQ ID NO: 3)
X⁷-N-H-V-R-X⁸-X⁹

[0029] wherein X⁷ is an amino acid selected from A, S, G, N, L, Y, H, D, E, Q, P, T and V; X⁸ is an amino acid selected from N, V, P, 1, T, S, Q, A, L and G; and X⁹ is an amino acid selected from I, S, T, L, V, M, Y, F, A and N.

[0030] Aspects disclosed herein provide AAV capsids comprising an AAV capsid protein comprising an amino acid sequence of Formula III

(III)
(SEQ ID NO: 4)
X¹⁰-N-V-X¹¹-X¹²-X¹³-X¹⁴

[0031] wherein X¹⁰ is an amino acid selected from A, S, G, N, L, Y, H, D, E, Q, P, T and V; X¹¹ is an amino acid selected from V and T; X² is an amino acid selected from K and R; X³ is an amino acid selected from N, V, P, I, T, S, Q, A, L and G; and X¹⁴ is an amino acid selected from I, S, T, L, V, M, Y, F, A and N.

[0032] Aspects disclosed herein provide AAV capsids comprising an AAV capsid protein comprising an amino acid sequence of Formula IV

(IV)
(SEQ ID NO: 5)
X¹⁵-N-T-X¹⁶-X¹⁷-X¹⁸-X¹⁹

[0033] wherein X¹⁵ is an amino acid selected from A, S, G, N, L, Y, H, D, E, Q, P, T and V; X¹⁶ is an amino acid selected from I, V and T; X¹⁷ is an amino acid selected from K and R; X¹⁸ is an amino acid selected from N, V, P, I, T, S, Q, A, L and G; and X¹⁹ is an amino acid selected from I, S, T, L, V, M, Y, F, A and N.

[0034] Aspects disclosed herein provide AAV capsids comprising an AAV capsid protein comprising an amino acid sequence of Formula V

(V)
(SEQ ID NO: 6)
X²⁰-N-X²¹-V-R-X²²-X²³

[0035] wherein X²⁰ is an amino acid selected from A, S, G, N, L, Y, H, D, E, Q, P, T and V; X²¹ is an amino acid selected from Q, S, V, T, N, H and A; X²² is an amino acid selected from N, V, P, I, T, S, Q, A and L; and X²³ is an amino acid selected from I, S, T, L, V, M, Y, F and A.

[0036] Aspects disclosed herein provide AAV capsids comprising an AAV capsid protein comprising an amino acid sequence of Formula VI

(VI)
(SEQ ID NO: 7)
X²⁴-N-X²⁵-T-K-X²⁶-X²⁷

[0037] wherein X²⁴ is an amino acid selected from A, S, L, N, H, D, E, P, T and V; X²⁵ is an amino acid selected from Q, S, V, T and N; X²⁶ is an amino acid selected from N, V, P, T, S, Q and G; and X²⁷ is an amino acid selected from I, S, T, L, V, M, Y, F, A and N.

[0038] In some embodiments, the AAV capsid protein comprises an amino acid sequence of formula VI wherein X²⁴ is V, N, L and E.

[0039] Aspects disclosed herein provide AAV capsids comprising an AAV capsid protein comprising an amino acid sequence of Formula VII

(VII)
(SEQ ID NO: 8)
X²⁸-N-X²⁹-T-R-X³⁰-X³¹

[0040] wherein X²⁸ is an amino acid selected from A, S, G, N, L, H, P, T and V; X²⁹ is an amino acid selected from Q, S, V, T and H; X³⁰ is an amino acid selected from N, V, T, S, Q, L and G; and X³¹ is an amino acid selected from I, S, T, V, M, Y, F, A and N.

[0041] In some embodiments, the AAV capsid protein comprises an amino acid sequence of formula VII wherein X²⁹ is T or Q.

[0042] In some embodiments, the AAV capsid protein comprises an amino acid sequence of formula VII wherein X³¹ is an amino acid selected from T, V and N.

[0043] In some embodiments, the sequence as described in Table 1, is selected from GNTTRVT (SEQ ID NO: 9), LNSVRNT (SEQ ID NO: 10), NNNTKPS (SEQ ID NO: 11), GNSIKVV (SEQ ID NO: 12), GNSVRIS (SEQ ID NO: 13), ENHVRSS (SEQ ID NO: 14), SNTTRQT (SEQ ID NO: 15), TNSVKAT (SEQ ID NO: 16), GNTTRLV (SEQ ID NO: 17), SNSVRLV (SEQ ID NO: 18), ENSTKSL (SEQ ID NO: 19), ANSTRTT (SEQ ID NO: 20), PNQTRNN (SEQ ID NO: 21), QNSVKGY (SEQ ID NO: 22), GNHVRLA (SEQ ID NO: 23), VNSTKST (SEQ ID NO: 24), and DNSIRSS (SEQ ID NO: 25).

[0044] In some embodiments, the sequence as described in Table 1, is selected from AQGNTTRVTAQ (SEQ ID NO: 26), AQLNSVRNTAQ (SEQ ID NO: 27), AQNNNTKPSAQ (SEQ ID NO: 28), AQGNSIKVVAQ (SEQ ID NO: 29), AQGNSVRISAQ (SEQ ID NO: 30), AQENHVRSSAQ (SEQ ID NO: 31), AQSNTTRQTAQ (SEQ ID NO: 32), AQTNSVKATAQ (SEQ ID NO: 33), AQGNTTRLVAQ (SEQ ID NO: 34), AQSNSVRLVAQ (SEQ ID NO: 35), AQENSTKSLAQ (SEQ ID NO: 36), AQANSTRTTAQ (SEQ ID NO: 37), AQPNQTRNNAQ (SEQ ID NO: 38), AQQNSVKGYAQ (SEQ ID NO: 39), AQGNHVRLAAQ (SEQ ID NO: 40), AQVNSTKSTAQ (SEQ ID NO: 41), and AQDNSIRSSAQ(SEQ ID NO: 42).

[0045] In some embodiments, the insertion sequence is represented by the peptide sequences listed in Table 1.

TABLE 1

| | SEQ | | SEQ |
|---|---|---|---|
| | ID | | ID |
| Sequence | NO | Sequence | NO |
| GNTTRVT | 9 | AQGNTTRVTAQ | 26 |
| LNSVRNT | 10 | AQLNSVRNTAQ | 27 |
| NNNTKPS | 11 | AQNNNTKPSAQ | 28 |
| GNSIKVV | 12 | AQGNSIKVVAQ | 29 |
| GNSVRIS | 13 | AQGNSVRISAQ | 30 |
| ENHVRSS | 14 | AQENHVRSSAQ | 31 |
| SNTTRQT | 15 | AQSNTTROTAQ | 32 |
| TNSVKAT | 16 | AQTNSVKATAQ | 33 |
| GNTTRLV | 17 | AQGNTTRLVAQ | 34 |
| SNSVRLV | 18 | AQSNSVRLVAQ | 35 |
| ENSTKSL | 19 | AQENSTKSLAQ | 36 |
| ANSTRTT | 20 | AQANSTRTTAQ | 37 |
| PNQTRNN | 21 | AQPNQTRNNAQ | 38 |
| QNSVKGY | 22 | AQQNSVKGYAQ | 39 |
| GNHVRLA | 23 | AQGNHVRLAAQ | 40 |
| VNSTKST | 24 | AQVNSTKSTAQ | 41 |
| DNSIRSS | 25 | AQDNSIRSSAQ | 42 |

[0046] In some aspects, the insertion amino acid sequence is at least 71.4% identical to the amino acid sequence provided in Table 1, FIG. 1 and and/or Formulas I-VII. In some aspects, the insertion amino acid sequence is at least 86.7% identical to the amino acid sequence provided in Table 1, FIG. 1 and and/or Formulas I-VII.

[0047] Also disclosed herein are methods and kits for producing therapeutic recombinant AAV (rAAV) particles, as well as methods and pharmaceutical compositions or formulations comprising the rAAV particles, for the treatment of a disease or condition affecting the CNS.

[0048] Disclosed herein are AAV capsids engineered with increased viral transduction in the CNS. The AAV capsids can encapsidate a viral vector with a heterologous nucleic acid encoding, for example, a therapeutic gene expression product. Transduction of the heterologous nucleic acid in the CNS can be achieved upon systemic delivery to a subject of the AAV capsid of the present disclosure encapsidating a heterologous nucleic acid. The AAV capsids disclosed herein are advantageous for many applications of gene therapy to treat human disease, including, but not limited to, disorders of the central nervous system.

[0049] The recombinant AAV vectors comprising a nucleic acid sequence encoding the AAV capsid proteins of the present disclosure as also provided herein. For example, the viral vectors of the present disclosure comprise a nucleic acid sequence comprising the AAV viral Cap (Capsid) encoding VP1, VP2, and VP3, at least one of which is modified to produce the AAV capsid proteins of the present disclosure. The recombinant AAV vector provided can be derived from an AAV serotype (e.g., AAV9) or a variant AAV serotype including an insertion of the present invention.

### AAV Capsids

[0050] Provided herein are modified adeno-associated (AAV) virus capsid compositions useful for integrating a transgene into a target cell or environment (in a subject when they are administered systemically to the subject.

[0051] An rAAV comprises an AAV capsid that can be engineered to encapsidate a heterologous nucleic acid (e.g., therapeutic nucleic acid, gene editing machinery). The AAV capsid is made up of three AAV capsid protein monomers, VP1, VP2, and VP3. Sixty copies of these three VP proteins interact in a 1:1:10 ratio to form the viral capsid. VP1 covers the whole of VP2 protein in addition to a ˜137 amino acid N-terminal region (VP1u), VP2 covers the whole of VP3 in addition to ˜65 amino acid N-terminal region (VP1/2 common region). The three capsid proteins share a conserved amino acid sequence of VP3, which in some cases is the region beginning at amino acid position 138 (e.g., AA139-736).

[0052] While not wishing to be bound by theory, it is understood that a parent AAV capsid sequence comprises a VP1 region. In certain embodiments, a parent AAV capsid sequence comprises a VP1, VP2 and/or VP3 region, or any combination thereof. A parent VP1 sequence may be considered synonymous with a parent AAV capsid sequence.

[0053] The AAV VP3 structure contains highly conserved regions that are common to all serotypes, a core eight-stranded β-barrel motif (βB-βI) and a small α-helix (αA). The loop regions inserted between the β-strands consist of the distinctive HI loop between β-strands H and I, the DE loop between β-strands D and E, and nine variable regions (VRs), which form the top of the loops. These VRs, such as the AA588 loop, are found on the capsid surface and can be associated with specific functional roles in the AAV life cycle including receptor binding, transduction and antigenic specificity.

[0054] In some aspects, the rAAV variant of the present invention comprises an AAV capsid protein having a peptide insertion at the residues corresponding to amino acids 588-589 of the AAV9 native sequence of SEQ ID NO: 1.

[0055] The AAV capsids comprise AAV capsid proteins (e.g., VP1, VP2, and VP3), each with an insertion, such as in the 588 loop of a parental AAV capsid protein structure (AAV9 VP1 numbering). The 588 loop contains the site of heparan sulfate binding of AAV2 and is amenable to peptide display. The only known receptors for AAV9 is N-linked terminal galactose and AAV receptor (AAVR), but many indications point toward there being others. Modifications to AAV9 588 loop are shown herein to confer an increased transgene transduction in target in vivo environments.

[0056] The present invention provides, in an aspect, a peptide insertion at the AAV 588 loop comprising or consisting of an amino-acid sequence set forth in any one of Table 1, FIG. 1 and and/or Formulas I-VII.

[0057] Disclosed herein are AAV capsids comprising AAV capsid proteins with an insertion at the 588 loop that confer a higher transduction in CNS cell types (e.g., brain endothelial cells, neurons, astrocytes). In particular, the AAV capsid proteins disclosed herein enable rAAV-mediated transduction of a heterologous nucleic acid (e.g., transgene) in the CNS of a subject. The AAV capsids of the present disclosure may be formulated as a pharmaceutical composition. In addition, the AAV capsids can be isolated and purified to be used for a variety of applications.

[0058] In some embodiments, the rAAV capsid of the present disclosure are generated using the methods disclosed herein. In some instances, the rAAV capsid is chimeric. In some instances, the rAAV, or variant AAV protein comprises therein, confer an increase in a localization of the rAAV within the target tissue, as compared to the parental AAV capsid or capsid protein.

### AAV Capsid Proteins

[0059] Disclosed herein are recombinant AAV (rAAV) capsids which comprise AAV capsid proteins that are engineered with a modified capsid protein (e.g., VP1, VP2, VP3). In some embodiments, the rAAV capsid proteins of the present disclosure are generated using the methods disclosed herein. In some embodiments, the AAV capsid proteins are used in the methods of delivering a therapeutic nucleic acid (e.g., a transgene) to a subject. In some instances, the rAAV capsid proteins have desired AAV expression rendering them particularly suitable for certain therapeutic applications, e.g., the treatment of a disease or disorder in a subject such as those disclosed herein.

[0060] The rAAV capsid proteins are engineered for optimized expression in the CNS, for example the brain, of a subject upon systemic administration of the rAAV to the subject. The rAAV capsid proteins are engineered to include the insertions provided in Table 1, FIG. 1 and and/or Formulas I-VII. The rAAV capsid proteins including the insertions provided in Table 1, FIG. 1 and and/or Formulas I-VII are engineered to achieve efficient transduction of an encapsidated transgene. In particular, the rAAV capsid proteins have increased expression in the brain of a subject.

[0061] The engineered AAV capsid proteins described herein have, in some cases, an insertion of an amino acid that is heterologous to the parental AAV capsid protein at amino acid positions in the 588 loop. In some embodiments, the amino acid is not endogenous to the parental AAV capsid protein at the amino acid position of the insertion. The amino acid may be a naturally occurring amino acid in the same or equivalent amino acid position as the insertion of the substitution in a different AAV capsid protein.

[0062] Generally, the insertion comprises a five-, six-, or seven-amino acid sequence (5-mer, 6-mer, or 7-mer, respectively) that is inserted or substituted at the 588 loop in a parental AAV capsid protein. Aspects provided herein provide amino acid insertions comprising seven amino acid polymer (7-mer) inserted at AA588-589, and may additionally include a substitution of one or two amino acids at amino acid positions flanking the 7-mer sequence (e.g., AA587-588 and/or AA589-590) to produce an eleven amino acid polymer (11-mer) at the 588 loop of a parental AAV capsid protein. The 7-mers described herein were advantageously generated using polymerase chain reaction (PCR) with degenerate primers, where each of the seven amino acids is encoded by a deoxyribose nucleic acid (DNA) sequence N—N—K. “N” is any of the four DNA nucleotides and K is guanine (G) or thymine (T). This method of generating random 7-mer amino acid sequences enables 1.28 billion possible combinations at the protein level.

[0063] The rAAV capsid proteins of the present disclosure comprise an insertion of an amino acid in an amino acid sequence of an AAV capsid protein. The AAV capsid, from which an engineered AAV capsid protein of the present disclosure is produced, is referred to as a “parental” AAV capsid. The complete genome of AAV-1 is provided in GenBank Accession No. NC_002077; the complete genome of AAV-2 is provided in GenBank Accession No. NC_001401 and Srivastava et al., J. Virol., 45: 555-564 (1983); the complete genome of AAV-3 is provided in GenBank Accession No. NC_1829; the complete genome of AAV-4 is provided in GenBank Accession No. NC_001829; the AAV-5 genome is provided in GenBank Accession No. AF085716; the complete genome of AAV-6 is provided in GenBank Accession No. NC_00 1862; at least portions of AAV-7 and AAV-8 genomes are provided in GenBank Accession Nos. AX753246 and AX753249, respectively; the AAV-9 genome is provided in Gao et al., J. Virol., 78: 6381-6388 (2004); the AAV-10 genome is provided in Mol. Ther., 13(1): 67-76 (2006); the AAV-11 genome is provided in Virology, 330(2): 375-383 (2004); portions of the AAV-12 genome are provided in Genbank Accession No. DQ813647; portions of the AAV-13 genome are provided in Genbank Accession No. EU285562.

[0064] In some cases, the parental AAV is derived from an AAV with a serotype selected from AAV1, AAV2, AAV3, AAV4, AAV5, AAV6, AAV7, AAV8, AAV9, AAV10, AAV11 and AAV12. The AAV capsid protein that is “derived” from another may be a variant AAV capsid protein. A variant may include, for example, a heterologous amino acid in an amino acid sequence of the AAV capsid protein. The heterologous amino acid may be non-naturally occurring in the AAV capsid protein. The heterologous amino acid may be naturally occurring in a different AAV capsid protein. In some instances, the parental AAV capsid is described in US Pat Publication 2020/0165576 and U.S. Pat. App. Ser. No. 62/832,826 and PCT/US20/20778; the content of each of which is incorporated herein.

[0065] In some instances, the parental AAV is AAV9. In some instances, the amino acid sequence of the AAV9 capsid protein comprises SEQ ID NO: 1. The amino acid sequence of AAV9 VP1 capsid protein (>tr|Q6JC40|Q6JC40_9VIRU Capsid protein VP1 OS=Adeno-associated virus 9 OX=235455 GN=cap PE=1 SV=1) is provided in SEQ ID NO: 1 (MAADGYLPDWLEDNLSEGIREWWALKPGAPQPK ANQQHQDNARGLVLPGYKYLGPG NGLDKGEPVNAADAAALEHDKAYDQQLKAGDNPYLKYNHADAEFQERLKEDTSFGG NLGRAVFQAKKRLLEPLGLVEEAAKTAPGKKRPVEQSPQEPDSSAGIGKSGAQPAKKRL NFGQTGDTESVPDPQPIGEPPAAPSGVGSLTMASGGGAPVADNNEGADGVGSSSGNW H CDSQWLGDRVITTSTRTWALPTYNNHLYKQISNSTSGGSSNDNAYFGYSTPWGYFDFN RFHCHFSPRDWQRLINNNWGFRPKRLNFKLFNIQVKEVTDNNGVKTIANNLTSTVQVFT DSDYQLPYVLGSAHEGCLPPFPADVFMIPQYGYLTLNDGSQAVGRSSFYCLEYFPSQML RTGNNFQFSYEFENVPFHSSYAHSQSLDRLMNPLIDQYLYYLSKTINGSGQNQQTLKFSV AGPSNMAVQGRNYIPGPSYRQQRVSTTVTQNNNSEFAWPGASSWALNGRNSLMNPGP AMASHKEGEDRFFPLSGSLIFGKQGTGRDNVDADKVMITNEEEIKTTNPVATESYGQVA TNHQSAQAQAQTGWVQNQGILPGMVWQDRDVYLQGPIWAKIPHTDGNFHPSPLMGGF GMKHPPPQILIKNTPVPADPPTAFNKDKLNSFITQYSTGQVSVEIEWELQKENSKRWNPE IQYTSNYYKSNNVEFAVNTEGVYSEPRPIGTRYLTRNL). In some instances, the parental AAV capsid protein sequence is 70%, 75%, 80%, 85%, 90%, 91%, 92%, 93%, 94%, 95%, 96%, 97%, 98%, 99%, or 100/6 homologous to SEQ ID NO: 1.

[0066] AAV capsid proteins from native AAV serotypes, such as AAV9, with tropisms including the liver activate the innate immune response, which in come cases causes a severe inflammatory response in a subject, which can lead to multi-organ failure. By improving transduction of a native AAV serotype for a target in vivo tissue (e.g., brain), the rAAV particles of the present disclosure reduce the immunogenic properties of AAV-mediated transgene delivery and prevent activation of the innate immune response.

[0067] In some instances, the parental AAV capsid protein comprises the entire VP1 region provided in SEQ ID NO: 1 (e.g., amino acids 1-736). In some instances, the parental AAV capsid protein comprises amino acids 217-736 in SEQ ID NO: 1, which is the common region found in VP1, VP2 and VP3 AAV9 capsid proteins. In some instances, the AAV capsid protein comprises amino acids 64-736 in SEQ ID NO: 1, which is the common region found in VP1 and VP2. The parental AAV capsid protein sequence may comprise amino acids selected from 1-736, 10-736, 20-736, 30-736, 40-736, 50-736, 60-736, 70-736, 80-736, 90-736, 100-736, 110-736, 120-736, 130-736, 140-736, 150-736, 160-736, 170-736, 180-736, 190-736, 200-736, 210-736, 220-736, 230-736, 240-736, 250-736, 260-736, 270-736, 280-736, 290-736, 300-736, 310-736, 320-736, 330-736, 340-736, 350-736, 360-736, 370-736, 380-736, 390-736, 400-736, 410-736, 420-736, 430-736, 440-736, and 450-736, from SEQ ID NO: 1. In some aspects, the rAAV variant comprises an AAV capsid protein comprising an amino acid sequence that is at least 98% identical to amino acid 217 to amino acid 736 of SEQ ID NO: 1. In some instances, the amino acid insertion is at a three (3)-fold axis of symmetry of a corresponding parental AAV capsid protein.

[0068] Disclosed herein are insertions of an amino acid sequence in an AAV capsid protein. Where the sequence numbering designation “588-589” is noted for AAV9, for example AAV VP1, the invention also includes insertions in similar locations in the other AAV serotypes. As used herein, “AA588-589” indicates that the insertion of the amino acid (or amino acid sequence) is immediately after an amino acid (AA) at position 588 and immediately before an AA at position 589 within an amino acid sequence of a parental AAV VP capsid protein (VP1 numbering). Amino acids 587-591 include a motif comprising “AQAQA” as set forth in SEQ ID NO: 1. Exemplary AAV capsid protein sequences are provided in Table 2. For example, GNTTRVT (SEQ ID NO: 9) is inserted at AA588-589 in an AAV9 capsid amino acid sequence, and provides variant A (SEQ ID NO: 48). It is envisioned that the sequences disclosed herein (Table 1, FIG. 1 and Formulas I-VII) may be inserted at AA588-589 in an amino acid sequence of a parental AAV9 capsid protein or at AA587-590 (replacing amino acids AA587-590), a variant thereof, or equivalent amino acid position of a parental AAV of a different serotype (e.g., AAV1, AAV2, AAV3, and the like). In any AAV capsid protein sequence disclosed herein, the amino acid at position 449 may be R or K.

TABLE 2
Exemplary AAV Capsid Protein Sequences

| SEQ | | |
|---|---|---|
| ID | Identi- | |
| NO: | fier | Sequence |
| 43 | AAV- | MAADGYLPDWLEDNLSEGIREWWALKPGAPQPKAN |
| | PHP.eB | QQHQDNARGLVLPGYKYLGPGNGLDKGEPVNAADA |
| | | AALEHDKAYDQQLKAGDNPYLKYNHADAEFQERLK |
| | | EDTSFGGNLGRAVFQAKKRLLEPLGLVEEAAKTAP |
| | | GKKRPVEQSPQEPDSSAGIGKSGAQPAKKRLNFGQ |
| | | TGDTESVPDPQPIGEPPAAPSGVGSLTMASGGGAP |
| | | VADNNEGADGVGSSSGNWHCDSQWLGDRVITTSTR |
| | | TWALPTYNNHLYKQISNSTSGGSSNDNAYFGYSTP |
| | | WGYFDFNRFHCHFSPRDWQRLINNNWGFRPKRLNF |
| | | KLFNIQVKEVTDNNGVKTIANNLTSTVQVFTDSDY |
| | | QLPYVLGSAHEGCLPPFPADVFMIPQYGYLTLNDG |
| | | SQAVGRSSFYCLEYFPSQMLRTGNNFQFSYEFENV |
| | | PFHSSYAHSQSLDRLMNPLIDQYLYYLSRTINGSG |
| | | QNQQTLKFSVAGPSNMAVQGRNYIPGPSYRQQRVS |
| | | TTVTQNNNSEFAWPGASSWALNGRNSLMNPGPAMA |
| | | SHKEGEDRFFPLSGSLIFGKQGTGRDNVDADKVMI |
| | | TNEEEIKTTNPVATESYGQVATNHQSDGTLAVPFK |
| | | AQAQTGWVQNQGILPGMVWQDRDVYLQGPIWAKIP |
| | | HTDGNFHPSPLMGGFGMKHPPPQILIKNTPVPADP |
| | | PTAFNKDKLNSFITQYSTGQVSVEIEWELQKENSK |
| | | RWNPEIQYTSNYYKSNNVEFAVNTEGVYSEPRPIG |
| | | TRYLTRNL |
| 44 | AAV.CAP- | MAADGYLPDWLEDNLSEGIREWWALKPGAPQPKAN |
| | A4 | QQHQDNARGLVLPGYKYLGPGNGLDKGEPVNAADA |
| | | AALEHDKAYDQQLKAGDNPYLKYNHADAEFQERLK |
| | | EDTSFGGNLGRAVFQAKKRLLEPLGLVEEAAKTAP |
| | | GKKRPVEQSPQEPDSSAGIGKSGAQPAKKRLNFGQ |
| | | TGDTESVPDPQPIGEPPAAPSGVGSLTMASGGGAP |
| | | VADNNEGADGVGSSSGNWHCDSQWLGDRVITTSTR |
| | | TWALPTYNNHLYKQISNSTSGGSSNDNAYFGYSTP |
| | | WGYFDFNRFHCHFSPRDWQRLINNNWGFRPKRLNF |
| | | KLFNIQVKEVTDNNGVKTIANNLTSTVQVFTDSDY |
| | | QLPYVLGSAHEGCLPPFPADVFMIPQYGYLTLNDG |
| | | SQAVGRSSFYCLEYFPSQMLRTGNNFQFSYEFENV |
| | | PFHSSYAHSQSLDRLMNPLIDQYLYYLSRTIKDNT |
| | | PGRQTLKFSVAGPSNMAVQGRNYIPGPSYRQQRVS |
| | | TTVTQNNNSEFAWPGASSWALNGRNSLMNPGPAMA |
| | | SHKEGEDRFFPLSGSLIFGKQGTGRDNVDADKVMI |
| | | TNEEEIKTTNPVATESYGQVATNHQSAQAQAQTGW |
| | | VQNQGILPGMVWQDRDVYLQGPIWAKIPHTDGNFH |
| | | PSPLMGGFGMKHPPPQILIKNTPVPADPPTAFNKD |
| | | KLNSFITQYSTGQVSVEIEWELQKENSKRWNPEIQ |
| | | YTSNYYKSNNVEFAVNTEGVYSEPRPIGTRYLTRN |
| | | L |
| 45 | AAV.CAP- | MAADGYLPDWLEDNLSEGIREWWALKPGAPQPKAN |
| | B2 | QQHQDNARGLVLPGYKYLGPGNGLDKGEPVNAADA |
| | | AALEHDKAYDQQLKAGDNPYLKYNHADAEFQERLK |
| | | EDTSFGGNLGRAVFQAKKRLLEPLGLVEEAAKTAP |
| | | GKKRPVEQSPQEPDSSAGIGKSGAQPAKKRLNFGQ |
| | | TGDTESVPDPQPIGEPPAAPSGVGSLTMASGGGAP |
| | | VADNNEGADGVGSSSGNWHCDSQWLGDRVITTSTR |
| | | TWALPTYNNHLYKQISNSTSGGSSNDNAYFGYSTP |
| | | WGYFDFNRFHCHFSPRDWQRLINNNWGFRPKRLNF |
| | | KLFNIQVKEVTDNNGVKTIANNLTSTVQVFTDSDY |
| | | QLPYVLGSAHEGCLPPFPADVFMIPQYGYLTLNDG |
| | | SQAVGRSSFYCLEYFPSQMLRTGNNFQFSYEFENV |
| | | PFHSSYAHSQSLDRLMNPLIDQYLYYLSRTIQQGK |
| | | QSVQTLKFSVAGPSNMAVQGRNYIPGPSYRQQRVS |
| | | TTVTQNNNSEFAWPGASSWALNGRNSLMNPGPAMA |
| | | SHKEGEDRFFPLSGSLIFGKQGTGRDNVDADKVMI |
| | | TNEEEIKTTNPVATESYGQVATNHQSDGTLAVPFK |
| | | AQAQTGWVQNQGILPGMVWQDRDVYLQGPIWAKIP |
| | | HTDGNFHPSPLMGGFGMKHPPPQILIKNTPVPADP |
| | | PTAFNKDKLNSFITQYSTGQVSVEIEWELQKENSK |
| | | RWNPEIQYTSNYYKSNNVEFAVNTEGVYSEPRPIG |
| | | TRYLTRNL |
| 46 | AAV.CAP- | MAADGYLPDWLEDNLSEGIREWWALKPGAPQPKAN |
| | B10 | QQHQDNARGLVLPGYKYLGPGNGLDKGEPVNAADA |
| | | AALEHDKAYDQQLKAGDNPYLKYNHADAEFQERLK |
| | | EDTSFGGNLGRAVFQAKKRLLEPLGLVEEAAKTAP |
| | | GKKRPVEQSPQEPDSSAGIGKSGAQPAKKRLNFGQ |
| | | TGDTESVPDPQPIGEPPAAPSGVGSLTMASGGGAP |
| | | VADNNEGADGVGSSSGNWHCDSQWLGDRVITTSTR |
| | | TWALPTYNNHLYKQISNSTSGGSSNDNAYFGYSTP |
| | | WGYFDFNRFHCHFSPRDWQRLINNNWGFRPKRLNF |
| | | KLFNIQVKEVTDNNGVKTIANNLTSTVQVFTDSDY |
| | | QLPYVLGSAHEGCLPPFPADVFMIPQYGYLTLNDG |
| | | SQAVGRSSFYCLEYFPSQMLRTGNNFQFYEFENVP |
| | | FHSSYAHSQSLDRLMNPLIDQYLYYLSRTIDGAAT |
| | | KNQTLKFSVAGPSNMAVQGRNYIPGPSYRQQRVST |
| | | TVTQNNNSEFAWPGASSWALNGRNSLMNPGPAMAS |
| | | HKEGEDRFFPLSGSLIFGKQGTGRDNVDADKVMIT |
| | | NEEEIKTTNPVATESYGQVATNHQSDGTLAVPFKA |
| | | QAQTGWVQNQGILPGMVWQDRDVYLQGPIWAKIPH |
| | | TDGNFHPSPLMGGFGMKHPPPQILIKNTPVPADPP |
| | | TAFNKDKLNSFITQYSTGQVSVEIEWELQKENSKR |
| | | WNPEIQYTSNYYKSNNVEFAVNTEGVYSEPRPIGT |
| | | RYLTRNL |
| 47 | AAV.CAP- | MAADGYLPDWLEDNLSEGIREWWALKPGAPQPKAN |
| | B22 | QQHQDNARGLVLPGYKYLGPGNGLDKGEPVNAADA |
| | | AALEHDKAYDQQLKAGDNPYLKYNHADAEFQERLK |
| | | EDTSFGGNLGRAVFQAKKRLLEPLGLVEEAAKTAP |
| | | GKKRPVEQSPQEPDSSAGIGKSGAQPAKKRLNFGQ |
| | | TGDTESVPDPQPIGEPPAAPSGVGSLTMASGGGAP |
| | | VADNNEGADGVGSSSGNWHCDSQWLGDRVITTSTR |
| | | TWALPTYNNHLYKQISNSTSGGSSNDNAYFGYSTP |
| | | WGYFDFNRFHCHFSPRDWQRLINNNWGFRPKRLNF |
| | | KLFNIQVKEVTDNNGVKTIANNLISTVQVFTDSDY |
| | | QLPYVLGSAHEGCLPPFPADVFMIPQYGYLTLNDG |
| | | SQAVGRSSFYCLEYFPSQMLRTGNNFQFSYEFENV |
| | | PFHSSYAHSQSLDRLMNPLIDQYLYYLSRTIDGQS |
| | | SKSQTLKFSVAGPSNMAVQGRNYIPGPSYRQQRVS |
| | | TTVTQNNNSEFAWPGASSWALNGRNSLMNPGPAMA |
| | | SHKEGEDRFFPLSGSLIFGKQGTGRDNVDADKVMI |
| | | TNEEEIKTTNPVATESYGQVATNHQSDGTLAVPFK |
| | | AQAQTGWVQNQGILPGMVWQDRDVYLQGPIWAKIP |
| | | HTDGNFHPSPLMGGFGMKHPPPQILIKNTPVPADP |
| | | PTAFNKDKLNSFITQYSTGQVSVEIEWELQKENSK |
| | | RWNPEIQYTSNYYKSNNVEFAVNTEGVYSEPRPIG |
| | | TRYLTRNL |
| 48 | Variant | MAADGYLPDWLEDNLSEGIREWWALKPGAPQPKAN |
| | A | QQHQDNARGLVLPGYKYLGPGNGLDKGEPVNAADA |
| | | AALEHDKAYDQQLKAGDNPYLKYNHADAEFQERLK |
| | | EDTSFGGNLGRAVFQAKKRLLEPLGLVEEAAKTAP |
| | | GKKRPVEQSPQEPDSSAGIGKSGAQPAKKRLNFGQ |
| | | TGDTESVPDPQPIGEPPAAPSGVGSLTMASGGGAP |
| | | VADNNEGADGVGSSSGNWHCDSQWLGDRVITTSTR |
| | | TWALPTYNNHLYKQISNSTSGGSSNDNAYFGYSTP |
| | | WGYFDFNRFHCHFSPRDWQRLINNNWGFRPKRLNF |
| | | KLFNIQVKEVTDNNGVKTIANNLTSTVQVFTDSDY |
| | | QLPYVLGSAHEGCLPPFPADVFMIPQYGYLTLNDG |
| | | SQAVGRSSFYCLEYFPSQMLRTGNNFQFSYEFENV |
| | | PFHSSYAHSQSLDRLMNPLIDQYLYYLSRTINGSG |
| | | QNQQTLKFSVAGPSNMAVQGRNYIPGPSYRQQRVS |
| | | TTVTQNNNSEFAWPGASSWALNGRNSLMNPGPAMA |
| | | SHKEGEDRFFPLSGSLIFGKQGTGRDNVDADKVMI |
| | | TNEEEIKTTNPVATESYGQVATNHQSAQGNTTRVT |
| | | AQAQTGWVQNQGILPGMVWQDRDVYLQGPIWAKIP |
| | | HTDGNFHPSPLMGGFGMKHPPPQILIKNTPVPADP |
| | | PTAFNKDKLNSFITQYSTGQVSVEIEWELQKENSK |
| | | RWNPEIQYTSNYYKSNNVEFAVNTEGVYSEPRPIG |
| | | TRYLTRNL |
| 51 | Variant | MAADGYLPDWLEDNLSEGIREWWALKPGAPQPKAN |
| | B | QQHQDNARGLVLPGYKYLGPGNGLDKGEPVNAADA |
| | | AALEHDKAYDQQLKAGDNPYLKYNHADAEFQERLK |
| | | EDTSFGGNLGRAVFQAKKRLLEPLGLVEEAAKTAP |
| | | GKKRPVEQSPQEPDSSAGIGKSGAQPAKKRLNFGQ |
| | | TGDTESVPDPQPIGEPPAAPSGVGSLTMASGGGAP |
| | | VADNNEGADGVGSSSGNWHCDSQWLGDRVITTSTR |
| | | TWALPTYNNHLYKQISNSTSGGSSNDNAYFGYSTP |
| | | WGYFDFNRFHCHFSPRDWQRLINNNWGFRPKRLNF |
| | | KLFNIQVKEVTDNNGVKTIANNLTSTVQVFTDSDY |
| | | QLPYVLGSAHEGCLPPFPADVFMIPQYGYLTLNDG |
| | | SQAVGRSSFYCLEYFPSQMLRTGNNFQFSYEFENV |
| | | PFHSSYAHSQSLDRLMNPLIDQYLYYLSRTINGSG |
| | | QNQQTLKFSVAGPSNMAVQGRNYIPGPSYRQQRVS |
| | | TTVTQNNNSEFAWPGASSWALNGRNSLMNPGPAMA |
| | | SHKEGEDRFFPLSGSLIFGKQGTGRDNVDADKVMI |
| | | TNEEEIKTTNPVATESYGQVATNHQSAQLNSVRNT |
| | | AQAQTGWVQNQGILPGMVWQDRDVYLQGPIWAKIP |
| | | HTDGNFHPSPLMGGFGMKHPPPQILIKNTPVPADP |
| | | PTAFNKDKLNSFITQYSTGQVSVEIEWELQKENSK |
| | | RWNPEIQYTSNYYKSNNVEFAVNTEGVYSEPRPIG |
| | | TRYLTRNL |
| 52 | Variant | MAADGYLPDWLEDNLSEGIREWWALKPGAPQPKAN |
| | C | QQHQDNARGLVLPGYKYLGPGNGLDKGEPVNAADA |
| | | AALEHDKAYDQQLKAGDNPYLKYNHADAEFQERLK |
| | | EDTSFGGNLGRAVFQAKKRLLEPLGLVEEAAKTAP |
| | | GKKRPVEQSPQEPDSSAGIGKSGAQPAKKRLNFGQ |
| | | TGDTESVPDPQPIGEPPAAPSGVGSLTMASGGGAP |
| | | VADNNEGADGVGSSSGNWHCDSQWLGDRVITTSTR |
| | | TWALPTYNNHLYKQISNSTSGGSSNDNAYFGYSTP |
| | | WGYFDFNRFHCHFSPRDWQRLINNNWGFRPKRLNF |
| | | KLFNIQVKEVTDNNGVKTIANNLTSTVQVFTDSDY |
| | | QLPYVLGSAHEGCLPPFPADVFMIPQYGYLTLNDG |
| | | SQAVGRSSFYCLEYFPSQMLRTGNNFQFSYEFENV |
| | | PFHSSYAHSQSLDRLMNPLIDQYLYYLSRTINGSG |
| | | QNQQTLKFSVAGPSNMAVQGRNYIPGPSYRQQRVS |
| | | TTVTQNNNSEFAWPGASSWALNGRNSLMNPGPAMA |
| | | SHKEGEDRFFPLSGSLIFGKQGTGRDNVDADKVMI |
| | | TNEEEIKTTNPVATESYGQVATNHQSAQGNSIKVV |
| | | AQAQTGWVQNQGILPGMVWQDRDVYLQGPIWAKIP |
| | | HTDGNFHPSPLMGGFGMKHPPPQILIKNTPVPADP |
| | | PTAFNKDKLNSFITQYSTGQVSVEIEWELQKENSK |
| | | RWNPEIQYTSNYYKSNNVEFAVNTEGVYSEPRPIG |
| | | TRYLTRNL |
| 53 | Variant | MAADGYLPDWLEDNLSEGIREWWALKPGAPQPKAN |
| | D | QQHQDNARGLVLPGYKYLGPGNGLDKGEPVNAADA |
| | | AALEHDKAYDQQLKAGDNPYLKYNHADAEFQERLK |
| | | EDTSFGGNLGRAVFQAKKRLLEPLGLVEEAAKTAP |
| | | GKKRPVEQSPQEPDSSAGIGKSGAQPAKKRLNFGQ |
| | | TGDTESVPDPQPIGEPPAAPSGVGSLTMASGGGAP |
| | | VADNNEGADGVGSSSGNWHCDSQWLGDRVITTSTR |
| | | TWALPTYNNHLYKQISNSTSGGSSNDNAYFGYSTP |
| | | WGYFDFNRFHCHFSPRDWQRLINNNWGFRPKRLNF |
| | | KLFNIQVKEVTDNNGVKTIANNLTSTVQVFTDSDY |
| | | QLPYVLGSAHEGCLPPFPADVFMIPQYGYLTLNDG |
| | | SQAVGRSSFYCLEYFPSQMLRTGNNFQFSYEFENV |
| | | PFHSSYAHSQSLDRLMNPLIDQYLYYLSRTINGSG |
| | | QNQQTLKFSVAGPSNMAVQGRNYIPGPSYRQQRVS |
| | | TTVTQNNNSEFAWPGASSWALNGRNSLMNPGPAMA |
| | | SHKEGEDRFFPLSGSLIFGKQGTGRDNVDADKVMI |
| | | TNEEEIKTTNPVATESYGQVATNHQSAQGNSVRIS |
| | | AQAQTGWVQNQGILPGMVWQDRDVYLQGPIWAKIP |
| | | HTDGNFHPSPLMGGFGMKHPPPQILIKNTPVPADP |
| | | PTAFNKDKLNSFITQYSTGQVSVEIEWELQKENSK |
| | | RWNPEIQYTSNYYKSNNVEFAVNTEGVYSEPRPIG |
| | | TRYLTRNL |
| 54 | Variant | MAADGYLPDWLEDNLSEGIREWWALKPGAPQPKAN |
| | E | QQHQDNARGLVLPGYKYLGPGNGLDKGEPVNAADA |
| | | AALEHDKAYDQQLKAGDNPYLKYNHADAEFQERLK |
| | | EDTSFGGNLGRAVFQAKKRLLEPLGLVEEAAKTAP |
| | | GKKRPVEQSPQEPDSSAGIGKSGAQPAKKRLNFGQ |
| | | TGDTESVPDPQPIGEPPAAPSGVGSLTMASGGGAP |
| | | VADNNEGADGVGSSSGNWHCDSQWLGDRVITTSTR |
| | | TWALPTYNNHLYKQISNSTSGGSSNDNAYFGYSTP |
| | | WGYFDFNRFHCHFSPRDWQRLINNNWGFRPKRLNF |
| | | KLFNIQVKEVTDNNGVKTIANNLTSTVQVFTDSDY |
| | | QLPYVLGSAHEGCLPPFPADVFMIPQYGYLTLNDG |
| | | SQAVGRSSFYCLEYFPSQMLRTGNNFQFSYEFENV |
| | | PFHSSYAHSQSLDRLMNPLIDQYLYYLSRTINGSG |
| | | QNQQTLKFSVAGPSNMAVQGRNYIPGPSYRQQRVS |
| | | TTVTQNNNSEFAWPGASSWALNGRNSLMNPGPAMA |
| | | SHKEGEDRFFPLSGSLIFGKQGTGRDNVDADKVMI |
| | | TNEEEIKTTNPVATESYGQVATNHQSAQENHVRSS |
| | | AQAQTGWVQNQGILPGMVWQDRDVYLQGPIWAKIP |
| | | HTDGNFHPSPLMGGFGMKHPPPQILIKNTPVPADP |
| | | PTAFNKDKLNSFITQYSTGQVSVEIEWELQKENSK |
| | | RWNPEIQYTSNYYKSNNVEFAVNTEGVYSEPRPIG |
| | | TRYLTRNL |
| 55 | Variant F | MAADGYLPDWLEDNLSEGIREWWALKPGAPQPKAN |
| | | QQHQDNARGLVLPGYKYLGPGNGLDKGEPVNAADA |
| | | AALEHDKAYDQQLKAGDNPYLKYNHADAEFQERLK |
| | | EDTSFGGNLGRAVFQAKKRLLEPLGLVEEAAKTAP |
| | | GKKRPVEQSPQEPDSSAGIGKSGAQPAKKRLNFGQ |
| | | TGDTESVPDPQPIGEPPAAPSGVGSLTMASGGGAP |
| | | VADNNEGADGVGSSSGNWHCDSQWLGDRVITTSTR |
| | | TWALPTYNNHLYKQISNSTSGGSSNDNAYFGYSTP |
| | | WGYFDFNRFHCHFSPRDWQRLINNNWGFRPKRLNF |
| | | KLFNIQVKEVTDNNGVKTIANNLTSTVQVFTDSDY |
| | | QLPYVLGSAHEGCLPPFPADVFMIPQYGYLTLNDG |
| | | SQAVGRSSFYCLEYFPSQMLRTGNNFQFSYEFENV |
| | | PFHSSYAHSQSLDRLMNPLIDQYLYYLSRTINGSG |
| | | QNQQTLKFSVAGPSNMAVQGRNYIPGPSYRQQRVS |
| | | TTVTQNNNSEFAWPGASSWALNGRNSLMNPGPAMA |
| | | SHKEGEDRFFPLSGSLIFGKQGTGRDNVDADKVMI |
| | | TNEEEIKTTNPVATESYGQVATNHQSAQSNTTRQT |
| | | AQAQTGWVQNQGILPGMVWQDRDVYLQGPIWAKIP |
| | | HTDGNFHPSPLMGGFGMKHPPPQILIKNTPVPADP |
| | | PTAFNKDKLNSFITQYSTGQVSVEIEWELQKENSK |
| | | RWNPEIQYTSNYYKSNNVEFAVNTEGVYSEPRPIG |
| | | TRYLTRNL |

[0069] The insertions described herein may, in some cases, comprise a 7-mer insertion at AA588-589. It is envisioned that any 7-mer insertion disclosed herein in addition to a substitution with any amino acid at amino acid positions 587-590 [AQAQ] may comprise an 11-mer.

[0070] Disclosed herein are AAV capsid proteins with an insertion described above in a parental AAV capsid protein that confers an increased transduction in the CNS in a subject, even when delivered systemically. One of the many advantages of the AAV capsid proteins described herein is their ability to target tissue and cells within the CNS. The tissue can be the brain. Non-limiting examples of CNS cells include a neuron and a glial cell. Glial cells can be selected from an oligodendrocyte, an ependymal cell, an astrocyte and a microglia.

[0071] In some instances, the AAV capsid protein comprises an insertion of at least or about seven, eight, nine, ten or eleven amino acids of an amino acid sequence of Table 1, FIG. 1 and Formulas I-VII at an amino acid position 588-589 or at 587-590 in a parental AAV9 capsid protein (SEQ ID NO: 1). In some cases, the AAV capsid protein has an increased viral transduction enrichment in brain.

[0072] The rAAV capsid proteins of the present disclosure may also have a substitution of an amino acid sequence at amino acid position 452-458 in a parental AAV9 capsid protein, or variant thereof, as described in WO2020068990. In some embodiments, the substitution of the amino acid sequence comprises KDNTPGR (SEQ ID NO: 74) at amino acid position 452-458 in the parental AAV9 capsid protein. In some embodiments, the substitution of the amino acid sequence comprises DGAATKN (SEQ ID NO: 75) at amino acid position 452-458 in the parental AAV9 capsid protein.

[0073] The rAAV capsid proteins described herein may be isolated and purified. The AAV may be isolated and purified by methods standard in the art such as by column chromatography, iodixanol gradients, or cesium chloride gradients. Methods for purifying AAV from helper virus are known in the art and may include methods disclosed in, for example, Clark et al., Hum. Gene Ther., 10(6). 1031-1039 (1999); Schenpp and Clark, Methods Mol. Med., 69; 427-443 (2002); U.S. Pat. No. 6,566,118 and WO 98/09657.

[0074] In addition, the AAV capsid proteins disclosed herein, either isolated and purified, or not, may be formulated into a pharmaceutical formulation, which in some cases, further comprises a pharmaceutically acceptable carrier.

[0075] The rAAV capsid protein can be conjugated to a nanoparticle, a second molecule, or a viral capsid protein. In some cases, the nanoparticle or viral capsid protein would encapsidate the therapeutic nucleic acid described herein. In some instances, the second molecule is a therapeutic agent, e.g., a small molecule, antibody, antigen-binding fragment, peptide, or protein, such as those described herein.

[0076] “Percent identity” is the percent of the symbols that actually match. Percent Similarity is the percent of the symbols that are similar. Symbols that are across from gaps are ignored. A similarity is scored when the scoring matrix value for a pair of symbols is greater than or equal to 0.50, the similarity threshold. The scoring matrix used in Version 10 of the Wisconsin Genetics Software Package is BLOSUM62 (see: Henikoff and Henikoff, (1989) Proc. Natl. Acad. Sci. USA 89: 10915).

[0077] Sequence identity/similarity values provided herein can refer to the value obtained using the BLAST+2.5.0 suite of programs using default settings (blast.ncbi.nlm.nih.gov) (Camacho, C., et al. (2009) BLAST+: architecture and applications. BMC Bioinformatics 10:421).

[0078] As those of ordinary skill in the art will understand, BLAST searches assume that proteins can be modeled as random sequences. However, many real proteins comprise regions of nonrandom sequences, which may be homopolymeric tracts, short-period repeats, or regions enriched in one or more amino acids. Such low-complexity regions may be aligned between unrelated proteins even though other regions of the protein are entirely dissimilar. A number of low-complexity filter programs can be employed to reduce such low-complexity alignments. For example, the SEG (Wooten and Federhen, (1993) Comput. Chem. 17: 149-63) and XNU (Ci-ayerie and States (1993) Comput. Chem. 17: 191-201) low-complexity filters can be employed alone or in combination.

[0079] The terms “substantial identity” and “substantially identical” indicate that a polypeptide or nucleic acid comprises a sequence with between 55-100% sequence identity to a reference sequence, with at least 55% sequence identity, or at least 60%, or at least 65%, or at least 70%, or at least 75%, or at least 80%, or at least 85%, or at least 90%, or at least 95%, or at least 99% sequence identity or any percentage of value within the range of 55-100% sequence identity relative to the reference sequence. The percent sequence identity may occur over a specified comparison window. Optimal alignment may be ascertained or conducted using the homology alignment algorithm of Needleman and Wunsch, supra.

[0080] For example, the insertion sequences may include, but are not limited to, sequences that are not exactly the same as the sequences disclosed herein, but which have, in addition to the substitutions explicitly described for various sequences listed herein, additional substitutions of amino acid residues which substantially do not impair the activity or properties of the sequences described herein, such as those predicted by homology software e.g. BLOSUM62 matrices.

### AAV Particles

[0081] The rAAV particles with the insertion sequences described herein have an increased transduction enrichment in the CNS. In some instances, the increased transduction enrichment comprises a 1-fold, 2-fold, 3-fold, 4-fold, 5-fold, 6-fold, 7-fold, 8-fold, 9-fold or 10-fold increase, or more. In some instances, the increased transduction enrichment is at least I-fold. In some instances, the increased transduction enrichment is at least 2-fold. In some instances, the increased transduction enrichment is at least 4-fold.

[0082] The rAAV particles with the insertion sequences described herein have an increased expression enrichment in the CNS. Detecting whether a rAAV possesses more or less specificity for a target in vivo environment, includes measuring a level of gene expression product (e.g., RNA or protein) expressed from the heterologous nucleic acid encapsidated by the rAAV in a tissue sample obtained from a subject. Suitable methods for measuring expression of a gene expression product include next-generation sequencing (NGS) and quantitative polymerase chain reaction (qPCR).

[0083] The increased expression in the CNS is represented by the enrichment values provided in FIG. 1.

### Heterologous Nucleic Acids

[0084] Disclosed herein are therapeutic nucleic acids useful for the treatment or prevention of a disease or condition, or symptom of the disease or condition. In some embodiments, the therapeutic nucleic acids encode a therapeutic gene expression product. Non-limiting examples of gene expression products include proteins, polypeptides, peptides, enzymes, antibodies, antigen binding fragments, nucleic acid (RNA, DNA, antisense oligonucleotide, siRNA, and the like), and gene editing components, for use in the treatment, prophylaxis, and/or amelioration of the disease or disorder, or symptoms of the disease or disorder. In some instances, the therapeutic nucleic acids are placed in an organism, cell, tissue or organ of a subject by way of a rAAV, such as those disclosed herein.

[0085] Disclosed herein are rAAVs, each comprising a viral vector (e.g., a single stranded DNA molecule (ssDNA)). In some instances, the viral vector comprises two inverted terminal repeat (ITR) sequences that are about 145 bases each, flanking a transgene. In some embodiments, the transgene comprises a therapeutic nucleic acid, and in some cases, a promoter in cis with the therapeutic nucleic acid in an open reading frame (ORF). The promoter is capable of initiating transcription of therapeutic nucleic acid in the nucleus of the target cell. The ITR sequences can be from any AAV serotype. Non-limiting examples of AAV serotypes include AAV1, AAV2, AAV3, AAV4, AAV5, AAV6, AAV7, AAV8, AAV9, AAV10, AAV11, and AAV12. In some cases, an ITR is from AAV2. In some cases, an ITR is from AAV9.

[0086] Disclosed herein are transgenes that can comprise any number of nucleotides. In some cases, a transgene can comprise less than about 100 nucleotides. In some cases, a transgene can comprise at least about 100 nucleotides. In some cases, a transgene can comprise at least about 200 nucleotides. In some cases, a transgene can comprise at least about 300 nucleotides. In some cases, a transgene can comprise at least about 400 nucleotides. In some cases, a transgene can comprise at least about 500 nucleotides. In some cases, a transgene can comprise at least about 1000 nucleotides. In some cases, a transgene can comprise at least about 5000 nucleotides. In some cases, a transgene can comprise over 5,000 nucleotides. In some cases, a transgene can comprise between about 500 and about 5000 nucleotides. In some cases, a transgene comprises about 5000 nucleotides. In any of the cases disclosed herein, the transgene can comprise DNA, RNA, or a hybrid of DNA and RNA. In some cases, the transgene can be single stranded. In some cases, the transgene can be double stranded.

[0087] Disclosed herein are transgenes useful for modulating the expression or activity of a target gene or gene expression product thereof. In some instances, the transgene is encapsidated by an rAAV capsid protein of an rAAV particle described herein. In some instances, the rAAV particle is delivered to a subject to treat a disease or condition disclosed herein in the subject. In some instances, the delivery is systemic.

[0088] The transgenes disclosed herein are useful for expressing an endogenous gene at a level similar to that of a healthy or normal individual. This is particularly useful in the treatment of a disease or condition related to the underexpression, or lack of expression, of a gene expression product. In some embodiments, the transgenes disclosed herein are useful for overexpressing an endogenous gene, such that an expression level of the endogenous gene is above the expression level of a healthy or normal individual. Additionally, transgenes can be used to express exogenous genes (e.g., active agent such as an antibody, peptide, nucleic acid, or gene editing components). In some embodiments, the therapeutic gene expression product is capable of altering, enhancing, increasing, or inducing the activity of one or more endogenous biological processes in the cell. In some embodiments, the transgenes disclosed herein are useful for reducing expression of an endogenous gene, for example, a dominant negative gene. In some embodiments, the therapeutic gene expression product is capable of altering, inhibiting, reducing, preventing, eliminating, or impairing the activity of one or more endogenous biological processes in the cell. In some aspects, the increase of gene expression refers to an increase by at least about 20%, 30%, 40%, 50%, 60%, 70%, 80%/c, 85%, 90%, 95% and 100%. In one aspect, the protein product of the targeted gene may be increased by at least about 20%, 30%, 40%, 50%, 60/o, 70%, 80%, 85%, 90%, 95% and 100%. In some aspects, the decrease of gene expression refers to an increase by at least about 20%, 30%, 40%, 50%, 60%, 70%, 80%, 85%, 90%/c, 95% and 100%. In one aspect, the protein product of the targeted gene may be decreased by at least about 20%, 30%, 40%, 50%, 60%, 70%, 80%, 85%, 90%, 95% and 100%.

[0089] When endogenous sequences (endogenous or part of a transgene) are expressed with a transgene, the endogenous sequences can be full-length sequences (wild-type or mutant) or partial sequences. The endogenous sequences can be functional. Non-limiting examples of the function of these full length or partial sequences include increasing the serum half-life of the polypeptide expressed by a transgene (e.g., therapeutic gene) and/or acting as a carrier.

[0090] A transgene can be inserted into an endogenous gene such that all, some or none of the endogenous gene is expressed. For example, a transgene as described herein can be inserted into an endogenous locus such that some (N-terminal and/or C-terminal to a transgene) or none of the endogenous sequences are expressed, for example as a fusion with a transgene. In other cases, a transgene (e.g., with or without additional coding sequences of the endogenous gene) is integrated into any endogenous locus, for example a safe-harbor locus. For example, a Frataxin (FXN) transgene can be inserted into an endogenous FXN gene. A transgene can be inserted into any gene, e.g., the genes as described herein.

[0091] At least one advantage of the present disclosure is that virtually any therapeutic nucleic acid may be used to express any therapeutic gene expression product. In some instances, the therapeutic gene expression product is a therapeutic protein or a peptide (e.g., antibody, antigen-binding fragment, peptide, or protein). In one embodiment the protein encoded by the therapeutic nucleic acid is between 50-5000 amino acids in length. In some embodiments the protein encoded is between 50-2000 amino acids in length. In some embodiments the protein encoded is between 50-1000 amino acids in length. In some embodiments the protein encoded is between 50-1500 amino acids in length. In some embodiments the protein encoded is between 50-800 amino acids in length. In some embodiments the protein encoded is between 50-600 amino acids in length. In some embodiments the protein encoded is between 50-400 amino acids in length. In some embodiments the protein encoded is between 50-200 amino acids in length. In some embodiments the protein encoded is between 50-100 amino acids in length. In some embodiments the peptide encoded is between 4-50 amino acids in length. In some embodiments, the protein encoded is a tetrapeptide, a pentapeptide, a hexapeptide, a heptapeptide, an octapeptide, a nonapeptide, or a decapeptide. In some embodiments, the protein encoded comprises a peptide of 2-30 amino acids, such as for example 5-30, 10-30, 2-25, 5-25, 10-25, or 10-20 amino acids. In some embodiments, the protein encoded comprises a peptide of at least 11, 12, 13, 14, 15, 17, 20, 25 or 30 amino acids, or a peptide that is no longer than 50 amino acids, e.g. no longer than 35, 30, 25, 20, 17, 15, 14, 13, 12, 11 or 10 amino acids.

[0092] Non-limiting examples of therapeutic protein or peptides include an adrenergic agonist, an anti-apoptosis factor, an apoptosis inhibitor, a cytokine receptor, a cytokine, a cytotoxin, an erythropoietic agent, a glutamic acid decarboxylase, a glycoprotein, a growth factor, a growth factor receptor, a hormone, a hormone receptor, an interferon, an interleukin, an interleukin receptor, a kinase, a kinase inhibitor, a nerve growth factor, a netrin, a neuroactive peptide, a neuroactive peptide receptor, a neurogenic factor, a neurogenic factor receptor, a neuropilin, a neurotrophic factor, a neurotrophin, a neurotrophin receptor, an N-methyl-D-aspartate antagonist, a plexin, a protease, a protease inhibitor, a protein decarboxylase, a protein kinase, a protein kinsase inhibitor, a proteolytic protein, a proteolytic protein inhibitor, a semaphoring, a semaphorin receptor, a serotonin transport protein, a serotonin uptake inhibitor, a serotonin receptor, a serpin, a serpin receptor, and a tumor suppressor. In certain embodiments, the therapeutic protein or peptide is selected from brain-derived neurotrophic factor (BDNF), ciliary neurotrophic factor (CNTF), macrophage colony-stimulating factor (CSF), epidermal growth factor (EGF), fibroblast growth factor (FGF), gonadotropin, interferon-gamma (IFN), insulin-like growth factor 1 (IFG-1), nerve growth factor (NGF), platelet-derived growth factor (PDGF), pigment epithelium-derived factor (PEDF), transforming growth factor (TGF), transforming growth factor-beta (TGF-B), tumor necrosis factor (TNF), vascular endothelial growth factor (VEGF), prolactin, somatotropin, X-linked inhibitor of apoptosis protein 1 (XIAP1), interleukin 1 (IL-1), IL-2, IL-3, IL-4, IL-5, IL-6, IL-7, IL-8, IL-9, IL-10, IL-10, viral IL-10, IL-11, IL-12, IL-13, IL-14, IL-15, IL-16, IL-17, and IL-18.

[0093] A therapeutic gene expression product can comprise gene editing components. Non-limiting examples of gene editing components include those required for CRISPR/Cas, artificial site-specific RNA endonuclease (ASRE), zinc finger endonuclease (ZFN), and transcription factor like effector nuclease (TALEN). In a non-limiting example, a subject having Huntington's disease is identified. The subject is then systemically administered a first amount of a rAAV encapsidating a viral vector encoding ZFN engineered to represses the transcription of the Huntingtin (HTT) gene. The rAAV will include a modified AAV capsid protein that includes an amino acid sequence provided in any one of Table 1, FIG. 1 and Formulas I-VII, so as to allow proper targeting of the ZFN to the nervous system, while reducing expression in off-target organs, such as the liver. If needed, the subject is administered a second or third dose of the rAAV, until a therapeutically effective amount of the ZFN is expressed in the subject's nervous system.

[0094] A therapeutic nucleic acid can comprise a non-protein coding gene e.g., sequences encoding antisense RNAs, RNAi, shRNAs and micro RNAs (miRNAs), miRNA sponges or decoys, recombinase delivery for conditional gene deletion, conditional (recombinase-dependent) expression, includes those required for the gene editing components described herein. The non-protein coding gene may also encode a tRNA, rRNA, tmRNA, piRNA, double stranded RNA, snRNA, snoRNA, and/or long non-coding RNA (IncRNA). In some cases, the non-protein coding gene can modulate the expression or the activity of a target gene or gene expression product. For example, the RNAs described herein may be used to inhibit gene expression in the CNS. In some cases, inhibition of gene expression refers to an inhibition by at least about 20%, 30%, 40%, 50%, 60%, 70%, 80%, 85%, 90%, 95% and 100%. In some cases, the protein product of the targeted gene may be inhibited by at least about 20%, 30%, 40%, 50%, 60%, 70%, 80%, 85%, 900, 95% and 100%. The gene can be either a wild type gene or a gene with at least one mutation. The targeted protein may be either a wild type protein or a protein with at least one mutation.

[0095] A therapeutic nucleic acid can modulate the expression or activity of a gene or gene expression product expressed from the gene that is implicated in a disease or disorder of the CNS. For example, the therapeutic nucleic acid, in some cases is a gene or a modified version of the gene described herein. In some instances, the gene or gene expression product is inhibited. In some instances, the gene or gene expression product is enhanced.

[0096] In another example, the therapeutic nucleic acid comprises an effector gene expression product such as a gene editing component specific to target a gene therein. Non-limited examples of genes include target gene or gene expression product selected from ATP1A2, CACNAIA, SETD5, SHANK3, NF2, DNMTI, TCF4, RAI1, PEXI, ARSA, EIF2B5, EIF2B1, EIF2B2, NPC1, ADAR, MFSD8, STXBP1, PRICKLE2, PRRT2, IDUA, STX1B, Sarcoglycan Alpha (SGCA), glutamic acid decarboxylase 65 (GAD65), glutamic acid decarboxylase 67 (GAD67), CLN2, Nerve Growth Factor (NGF), glial cell derived neurotrophic factor (GDNF), Survival Of Motor Neuron 1, STXBP1, Telomeric (SMN1), Factor X (FIX), Retinoid Isomerohydrolase (RPE65), sarco/endoplasmic reticulum Ca2+-ATPase (SERCA2a), Glucocerebrosidase (GCase), galactocerebrosidase (GALC), CDKL5, Frataxin (FXN), Huntingtin (HTT), methyl-CpG binding protein 2 (MECP2), a peroxisomal biogenesis factor (PEX), progranulin (GRN), an antitubulin agent, copper-zinc superoxide dismutase (SODI), iduronate 2 sulfatase (hIDS), Glucosylceramidase Beta (GBA), fragile X mental retardation 1 (FMR1), NPC Intracellular Cholesterol Transporter 1 (NPC1), SCN1A, C9orf72, NPS3 and a NLRP3 inflammasome. In some embodiments, the peroxisomal biogenesis factor (PEX) is selected from PEX1, PEX2, PEX3, PEX4, PEX5, PEX6, PEX7, PEX10, PEX 110, PEX12, PEX13, PEX14, PEX16, PEX19, and PEX26. In some instances, the gene or gene expression product is inhibited. In some instances, the gene or gene expression product is enhanced.

### AAV Vectors

[0097] Aspects disclosed herein comprise plasmid vectors comprising a nucleic acid sequence encoding the AAV capsids and AAV capsid proteins described herein. AAV vectors described herein are useful for the assembly of a rAAV and viral packaging of a heterologous nucleic acid. In addition, an AAV vector may encode a transgene comprising the heterologous nucleic acid.

[0098] An AAV vector can comprise a transgene, which in some cases encodes a heterologous gene expression product (e.g., therapeutic gene expression product, recombinant capsid protein, and the like). The transgene is in cis with two inverted terminal repeats (ITRs) flanking the transgene. The transgene may comprise a therapeutic nucleic acid encoding a therapeutic gene expression product. Due to the limited packaging capacity of the rAAV (˜5 kB), in some cases, a longer transgene may be split between two AAV vectors, the first with 3′ splice donor and the second with a 5′ splice acceptor. Upon co-infection of a cell, concatemers form, which are spliced together to express a full-length transgene.

[0099] A transgene is generally inserted so that its expression is driven by the endogenous promoter at the integration site, namely the promoter that drives expression of the endogenous gene into which a transgene is inserted. In some instances, a transgene comprises a promoter and/or enhancer, for example a constitutive promoter or an inducible or tissue/cell specific promoter. As a non-limiting example, the promoter may be CMV promoter, a CMV-β-Actin-intron-β-Globin hybrid promoter (CAG), CBA promoter, FRDA or FXN promoter, UBC promoter, GUSB promoter, NSE promoter, Synapsin promoter, MeCP2 promoter, GFAP promoter, H1 promoter, U6 promoter, NFL promoter, NFH promoter, SCN8A promoter, or PGK promoter. As a non-limiting example, promoters can be tissue-specific expression elements include, but are not limited to, human elongation factor 1α-subunit (EF1α), immediate-early cytomegalovirus (CMV), chicken β-actin (CBA) and its derivative CAG, the β glucuronidase (GUSB), and ubiquitin C (UBC). The transgene may include a tissue-specific expression elements for neurons such as, but not limited to, neuron-specific enolase (NSE), platelet-derived growth factor (PDGF), platelet-derived growth factor B-chain (PDGF-β), the synapsin (Syn), the methyl-CpG binding protein 2 (MeCP2), Ca2+/calmodulin-dependent protein kinase II (CaMKII), metabotropic glutamate receptor 2 (mGluR2), NFL, NFH, np32, PPE, Enk and EAAT2 promoters. The transgene may comprise a tissue-specific expression element for astrocytes such as, but not limited to, the glial fibrillary acidic protein (GFAP) and EAAT2 promoters. The transgene may comprise tissue-specific expression elements for oligodendrocytes such as, but not limited to, the myelin basic protein (MBP) promoter.

[0100] In some embodiments, the promoter is less than 1 kb. The promoter may have a length of 200, 210, 220, 230, 240, 250, 260, 270, 280, 290, 300, 310, 320, 330, 340, 350, 360, 370, 380, 390, 400, 410, 420, 430, 440, 450, 460, 470, 480, 490, 500, 510, 520, 530, 540, 550, 560, 570, 580, 590, 600, 610, 620, 630, 640, 650, 660, 670, 680, 690, 700, 710, 720, 730, 740, 750, 760, 770, 780, 790, 800 or more than 800. The promoter may have a length between 200-300, 200-400, 200-500, 200-600, 200-700, 200-800, 300-400, 300-500, 300-600, 300-700, 300-800, 400-500, 400-600, 400-700, 400-800, 500-600, 500-700, 500-800, 600-700, 600-800 or 700-800. The promoter may provide expression of the therapeutic gene expression product for a period of time in targeted tissues such as, but not limited to, the CNS. Expression of the therapeutic gene expression product may be for a period of 1 hour, 2, hours, 3 hours, 4 hours, 5 hours, 6 hours, 7 hours, 8 hours, 9 hours, 10 hours, 11 hours, 12 hours, 13 hours, 14 hours, 15 hours, 16 hours, 17 hours, 18 hours, 19 hours, 20 hours, 21 hours, 22 hours, 23 hours, 1 day, 2 days, 3 days, 4 days, 5 days, 6 days, 1 week, 8 days, 9 days, 10 days, 11 days, 12 days, 13 days, 2 weeks, 15 days, 16 days, 17 days, 18 days, 19 days, 20 days, 3 weeks, 22 days, 23 days, 24 days, 25 days, 26 days, 27 days, 28 days, 29 days, 30 days, 31 days, 1 month, 2 months, 3 months, 4 months, 5 months, 6 months, 7 months, 8 months, 9 months, 10 months, 11 months, 1 year, 13 months, 14 months, 15 months, 16 months, 17 months, 18 months, 19 months, 20 months, 21 months, 22 months, 23 months, 2 years, 3 years, 4 years, 5 years, 6 years, 7 years, 8 years, 9 years, 10 years, 11 years, 12 years, 13 years, 14 years, 15 years, 16 years, 17 years, 18 years, 19 years, 20 years, 21 years, 22 years, 23 years, 24 years, 25 years, 26 years, 27 years, 28 years, 29 years, 30 years, 31 years, 32 years, 33 years, 34 years, 35 years, 36 years, 37 years, 38 years, 39 years, 40 years, 41 years, 42 years, 43 years, 44 years, 45 years, 46 years, 47 years, 48 years, 49 years, 50 years, 55 years, 60 years, 65 years, or more than 65 years. Expression of the payload may be for 1-5 hours, 1-12 hours, 1-2 days, 1-5 days, 1-2 weeks, 1-3 weeks, 1-4 weeks, 1-2 months, 1-4 months, 1-6 months, 2-6 months, 3-6 months, 3-9 months, 4-8 months, 6-12 months, 1-2 years, 1-5 years, 2-5 years, 3-6 years, 3-8 years, 4-8 years or 5-10 years or 10-15 years, or 15-20 years, or 20-25 years, or 25-30 years, or 30-35 years, or 35-40 years, or 40-45 years, or 45-50 years, or 50-55 years, or 55-60 years, or 60˜65 years.

[0101] An AAV vector can comprise a genome of a helper virus. Helper virus proteins are required for the assembly of a recombinant AAV (rAAV), and packaging of a transgene containing a heterologous nucleic acid into the rAAV. The helper virus genes are adenovirus genes E4, E2a and VA, that when expressed in the cell, assist with AAV replication. In some embodiments, an AAV vector comprises E2. In some embodiments, an AAV vector comprises E4. In some embodiments, an AAV vector comprises VA. In some instances, the AAV vector comprises one of helper virus proteins, or any combination.

[0102] The target gene or gene expression product for use in a transgene can be selected from ATP1A2, CACNAIA, SETD5, SHANK3, NF2, DNMTI, TCF4, RAI1, PEXI, ARSA, EIF2B5, EIF2B1, EIF2B2, NPC1, ADAR, MFSD8, STXBP1, PRICKLE2, PRRT2, IDUA, STX1B, Sarcoglycan Alpha (SGCA), glutamic acid decarboxylase 65 (GAD65), glutamic acid decarboxylase 67 (GAD67), CLN2, Nerve Growth Factor (NGF), glial cell derived neurotrophic factor (GDNF), Survival Of Motor Neuron 1, STXBP1, Telomeric (SMN1), Factor X (FIX), Retinoid Isomerohydrolase (RPE65), sarco/endoplasmic reticulum Ca2+-ATPase (SERCA2a), Glucocerebrosidase (GCase), galactocerebrosidase (GALC), CDKL5, Frataxin (FXN), Huntingtin (HTT), methyl-CpG binding protein 2 (MECP2), a peroxisomal biogenesis factor (PEX), progranulin (GRN), an antitubulin agent, copper-zinc superoxide dismutase (SODI), iduronate 2 sulfatase (hIDS), Glucosylceramidase Beta (GBA), fragile X mental retardation 1 (FMR1), NPC Intracellular Cholesterol Transporter 1 (NPC1), SCN1A, C9orf72, NPS3 and a NLRP3 inflammasome. In some embodiments, the peroxisomal biogenesis factor (PEX) is selected from PEX1, PEX2, PEX3, PEX4, PEX5, PEX6, PEX7, PEX10, PEX11p, PEX12, PEX13, PEX14, PEX16, PEX19, and PEX26.

[0103] An AAV vector can comprise a viral genome comprising a nucleic acid encoding the recombinant AAV (rAAV) capsid protein described herein. The viral genome can comprise a Replication (Rep) gene encoding a Rep protein, and Capsid (Cap) gene encoding an AAP protein in the first open reading frame (ORF1) or a Cap protein in the second open reading frame (ORF2). The Rep protein is selected from Rep78, Rep68, Rep52, and Rep40. In some instances, the Cap gene is modified encoding a modified AAV capsid protein described herein. A wild-type Cap gene encodes three proteins, VP1, VP2, and VP3. In some cases, VP1 is modified. In some cases, VP2 is modified. In some cases, VP3 is modified. In some cases, all three VP1-VP3 are modified. The AAV vector can comprise nucleic acids encoding wild-type Rep78, Rep68, Rep52, Rep40 and AAP proteins.

[0104] In some instances, the AAV9 VP1 gene provided in SEQ ID NO: 56 shown in Table 3, is modified to include any one of SEQ ID NOS: 57-73. The AAV vector described herein may be used to produce a variant AAV capsid by the methods described herein.

TABLE 3
VPI Capsid Protein Nucleic Acid Sequences

| SEQ | | |
|---|---|---|
| ID | | |
| NO: | Identifier | Sequence |
| 56 | AAV9 | ATGGCTGCCGATGGTTATCTTCCAGATTGG |
| | >AY530579.1 | CTCGAGGACAACCTTAGTGAAGGAATTCGC |
| | Adeno- | GAGTGGTGGGCTTTGAAACCTGGAGCCCCT |
| | associated | CAACCCAAGGCAAATCAACAACATCAAGAC |
| | virus 9 | AACGCTCGAGGTCTTGTGCTTCCGGGTTAC |
| | isolate | AAATACCTTGGACCCGGCAACGGACTCGAC |
| | hu.14 | AAGGGGGAGCCGGTCAACGCAGCAGACGCG |
| | capsid | GCGGCCCTCGAGCACGACAAGGCCTACGAC |
| | protein | CAGCAGCTCAAGGCCGGAGACAACCCGTAC |
| | VP1 | CTCAAGTACAACCACGCCGACGCCGAGTTC |
| | (cap | CAGGAGCGGCTCAAAGAAGATACGTCTTTT |
| | gene, | GGGGGCAACCTCGGGCGAGCAGTCTTCCAG |
| | complete | GCCAAAAAGAGGCTTCTTGAACCTCTTGGT |
| | cds | CTGGTTGAGGAAGCGGCTAAGACGGCTCCT |
| | | GGAAAGAAGAGGCCTGTAGAGCAGTCTCCT |
| | | CAGGAACCGGACTCCTCCGCGGGTATTGGC |
| | | AAATCGGGTGCACAGCCCGCTAAAAAGAGA |
| | | CTCAATTTCGGTCAGACTGGCGACACAGAG |
| | | TCAGTCCCAGACCCTCAACCAATCGGAGAA |
| | | CCTCCCGCAGCCCCCTCAGGTGTGGGATCT |
| | | CTTACAATGGCTTCAGGTGGTGGCGCACCA |
| | | GTGGCAGACAATAACGAAGGTGCCGATGGA |
| | | GTGGGTAGTTCCTCGGGAAATTGGCATTGC |
| | | GATTCCCAATGGCTGGGGGACAGAGTCATC |
| | | ACCACCAGCACCCGAACCTGGGCCCTGCCC |
| | | ACCTACAACAATCACCTCTACAAGCAAATC |
| | | TCCAACAGCACATCTGGAGGATCTTCAAAT |
| | | GACAACGCCTACTTCGGCTACAGCACCCCC |
| | | TGGGGGTATTTTGACTTCAACAGATTCCAC |
| | | TGCCACTTCTCACCACGTGACTGGCAGCGA |
| | | CTCATCAACAACAACTGGGGATTCCGGCCT |
| | | AAGCGACTCAACTTCAAGCTCTTCAACATT |
| | | CAGGTCAAAGAGGTTACGGACAACAATGGA |
| | | GTCAAGACCATCGCCAATAACCTTACCAGC |
| | | ACGGTCCAGGTCTTCACGGACTCAGACTAT |
| | | CAGCTCCCGTACGTGCTCGGGTCGGCTCAC |
| | | GAGGGCTGCCTCCCGCCGTTCCCAGCGGAC |
| | | GTTTTCATGATTCCTCAGTACGGGTATCTG |
| | | ACGCTTAATGATGGAAGCCAGGCCGTGGGT |
| | | CGTTCGTCCTTTTACTGCCTGGAATATTTC |
| | | CCGTCGCAAATGCTAAGAACGGGTAACAAC |
| | | TTCCAGTTCAGCTACGAGTTTGAGAACGTA |
| | | CCTTTCCATAGCAGCTACGCTCACAGCCAA |
| | | AGCCTGGACCGACTAATGAATCCACTCATC |
| | | GACCAATACTTGTACTATCTCTCAAAGACT |
| | | ATTAACGGTTCTGGACAGAATCAACAAACG |
| | | CTAAAATTCAGTGTGGCCGGACCCAGCAAC |
| | | ATGGCTGTCCAGGGAAGAAACTACATACCT |
| | | GGACCCAGCTACCGACAACAACGTGTCTCA |
| | | ACCACTGTGACTCAAAACAACAACAGCGAA |
| | | TTTGCTTGGCCTGGAGCTTCTTCTTGGGCT |
| | | CTCAATGGACGTAATAGCTTGATGAATCCT |
| | | GGACCTGCTATGGCCAGCCACAAAGAAGGA |
| | | GAGGACCGTTTCTTTCCTTTGTCTGGATCT |
| | | TTAATTTTTGGCAAACAAGGAACTGGAAGA |
| | | GACAACGTGGATGCGGACAAAGTCATGATA |
| | | ACCAACGAAGAAGAAATTAAAACTACTAAC |
| | | CCGGTAGCAACGGAGTCCTATGGACAAGTG |
| | | GCCACAAACCACCAGAGTGCCCAAGCACAG |
| | | GCGCAGACCGGCTGGGTTCAAAACCAAGGA |
| | | ATACTTCCGGGTATGGTTTGGCAGGACAGA |
| | | GATGTGTACCTGCAAGGACCCATTTGGGCC |
| | | AAAATTCCTCACACGGACGGCAACTTTCAC |
| | | CCTTCTCCGCTGATGGGAGGGTTTGGAATG |
| | | AAGCACCCGCCTCCTCAGATCCTCATCAAA |
| | | AACACACCTGTACCTGCGGATCCTCCAACG |
| | | GCCTTCAACAAGGACAAGCTGAACTCTTTC |
| | | ATCACCCAGTATTCTACTGGCCAAGTCAGC |
| | | GTGGAGATCGAGTGGGAGCTGCAGAAGGAA |
| | | AACAGCAAGCGCTGGAACCCGGAGATCCAG |
| | | TACACTTCCAACTATTACAAGTCTAATAAT |
| | | GTTGAATTTGCTGTTAATACTGAAGGTGTA |
| | | TATAGTGAACCCCGCCCCATTGGCACCAGA |
| | | TACCTGACTCGTAATCTGTAA |

TABLE 4

| | SEQ | | SEQ |
|---|---|---|---|
| | ID | | ID |
| DNA Sequence | NO | Sequence | NO |
| GCTCAGGGTAATACT | 57 | AQGNTTRVTAQ | 26 |
| ACTCGTGTTACTGCT | | | |
| CAG | | | |
| GCTCAGTTGAATTCT | 58 | AQLNSVRNTAQ | 27 |
| GTTCGTAATACTGCT | | | |
| CAG | | | |
| GCTCAGAATAATAAT | 59 | AQNNNTKPSAQ | 28 |
| ACTAAGCCTTCTGCT | | | |
| CAG | | | |
| GCTCAGGGTAATTCT | 60 | AQGNSIKVVAQ | 29 |
| ATTAAGGTTGTTGCT | | | |
| CAG | | | |
| GCTCAGGGTAATTCT | 61 | AQGNSVRISAQ | 30 |
| GTTCGTATTTCTGCT | | | |
| CAG | | | |
| GCTCAGGAGAATCAT | 62 | AQENHVRSSAQ | 31 |
| GTTCGTTCTTCTGCT | | | |
| CAG | | | |
| GCTCAGTCTAATACT | 63 | AQSNTTRQTAQ | 32 |
| ACTCGTCAGACTGCT | | | |
| CAG | | | |
| GCTCAGACTAATACT | 64 | AQTNSVKATAQ | 33 |
| CATGTTTCTAAGGCT | | | |
| CAG | | | |
| GCTCAGGGTAATACT | 65 | AQGNTTRLVAQ | 34 |
| ACTCGTTTGGTTGCT | | | |
| CAG | | | |
| GCTCAGTCTAATTCT | 66 | AQSNSVRLVAQ | 35 |
| GTTCGTTTGGTTGCT | | | |
| CAG | | | |
| GCTCAGGAGAATTCT | 67 | AQENSTKSLAQ | 36 |
| ACTAAGTCTTTGGCT | | | |
| CAG | | | |
| GCTCAGGCTAATTCT | 68 | AQANSTRTTAQ | 37 |
| ACTCGTACTACTGCT | | | |
| CAG | | | |
| GCTCAGCCTAATCAG | 69 | AQPNQTRNNAQ | 38 |
| ACTCGTAATAATGCT | | | |
| CAG | | | |
| GCTCAGCAGAATTCT | 70 | AQQNSVKGYAQ | 39 |
| GTTAAGGGTTATGCT | | | |
| CAG | | | |
| GCTCAGGGTAATCAT | 71 | AQGNHVRLAAQ | 40 |
| GTTCGTTTGGCTGCT | | | |
| CAG | | | |
| GCTCAGGTTAATTCT | 72 | AQVNSTKSTAQ | 41 |
| ACTAAGTCTACTGCT | | | |
| CAG | | | |
| GCTCAGGATAATTCT | 73 | AQDNSIRSSAQ | 42 |
| ATTCGTTCTTCTGCT | | | |
| CAG | | | |

### Methods of Producing rAAVs

[0105] Disclosed herein are methods of producing the AAV capsids comprising the AAV capsid proteins and viral vector encoding a therapeutic nucleic acid. The AAV capsid proteins are produced by introducing into a cell (e.g., immortalized stem cell) a first vector containing a transgene cassette flanked by inverted terminal repeat (ITR) sequences from a parental AAV virus (the transgene cassette has a promoter sequence that drives transcription of a heterologous nucleic acid in the nucleus of the target cell), a second vector encoding the AAV genome with a AAV capsid protein (encoding the AAV Rep gene as well as the modified Cap gene for the variant being produced), and a third vector encoding helper virus proteins, required for assembly of the AAV capsid structure and packaging of the transgene in the modified AAV capsid structure. The assembled AAV capsid can be isolated and purified from the cell using suitable methods known in the art. Table 1 provide DNA sequences for using in the methods described herein.

[0106] The transgenes contained in a recombinant AAV (rAAV) vector and encapsidated by the AAV capsid proteins of the present disclosure are also provided herein. The transgenes disclosed herein are delivered to a subject for a variety of purposes, such as to treat a disease or condition in the subject. The transgene can be gene editing components that modulate the activity or expression of a target gene or gene expression product. Alternatively, the transgene is a gene encoding a therapeutic gene expression product that is effective to modulate the activity or expression of itself, or another target gene or gene expression product.

[0107] Aspects disclosed herein provide methods of manufacturing rAAV virus or virus particles comprising: (a) introducing into a cell a nucleic acid comprising: (i) first vector containing a transgene cassette flanked by inverted terminal repeat (ITR) sequences from a parental AAV virus (the transgene cassette has a promoter sequence that drives transcription of a heterologous nucleic acid in the nucleus of the target cell); (ii) a second vector encoding the AAV genome with a AAV capsid protein of the present invention; and (iii) a vector encoding helper virus proteins, required for assembly of the AAV capsid structure and packaging of the transgene in the modified AAV capsid structure; (b) expressing in the cell the AAV capsid protein described herein; (c) assembling an AAV particle comprising the AAV capsid proteins disclosed herein; and (d) packaging the AAV particle. In some instances, the cell is mammalian. In some instances, the cell is immortalized. In some instances, the immortalized cell is an embryonic stem cell. In some instances, the embryonic stem cell is a human embryonic stem cell. In some instances, the human embryonic stem cell is a human embryonic kidney 293 (HEK-293) cell. In some instances, the Cap gene is derived from the deoxyribose nucleic acid (DNA) provided in SEQ ID NO: 6. In some instances, the 5′ ITR and the 3′ ITR are derived from an AAV2 serotype. In some instances, the 5′ ITR and the 3′ ITR are derived from an AAV5 serotype. In some instances, the 5′ ITR and the 3′ ITR are derived from an AAV9 serotype. In some instances, the first nucleic acid sequence and the second nucleic acid sequence are in trans. In some instances, the first nucleic acid sequence and the second nucleic acid sequence are in cis. In some instances, the first nucleic acid sequence, the second nucleic acid sequence and the third nucleic acid sequence, are in trans.

[0108] The Cap gene disclosed here comprises any one of SEQ ID NOS:57-73 from Table 4, which are DNA sequences encoding the modified AAV capsid protein portions of the present disclosure.

[0109] In some instances, the methods comprise packing the first nucleic acid sequence encoding the therapeutic gene expression product such that it becomes encapsidated by the modified AAV capsid protein. In some embodiments, the rAAV particles are isolated, concentrated, and purified using suitable viral purification methods, such as those described herein.

[0110] In some cases, rAAVs of the present disclosure are generated using the methods described in Challis, R. C. et al. Nat. Protoc. 14, 379 (2019). Briefly, triple transfection of HEK293T cells (ATCC) using polyethylenimine (PEI) is performed, viruses are collected after 120 hours from both cell lysates and media and purified over iodixanol. In a non-limiting example, the rAAVs are generated by triple transfection of precursor cells (e.g., HEK293T) cells using a standard transfection protocol (e.g., PEI). Viral particles are harvested from the media after a period of time (e.g., 72 h post transfection) and from the cells and media at a later point in time (e.g., 120 h post transfection). Virus present in the media is concentrated by precipitation with 8% polyethylene glycol (PEG) and 500 mM sodium chloride and the precipitated virus is added to the lysates prepared from the collected cells. The viruses are purified over iodixanol (Optiprep, Sigma) step gradients (15%, 25%, 40% and 60%). Viruses are concentrated and formulated in PBS. Virus titers are determined by measuring the number of DNaseI-resistant vector genome copies (VGs) using qPCR and the linearized genome plasmid as a control.

[0111] The cell can be selected from a human, a primate, a murine, a feline, a canine, a porcine, an ovine, a bovine, an equine, an epine, a caprine and a lupine host cell. In some instances, the cell is a progenitor or precursor cell, such as a stem cell. In some instances, the stem cell is a mesenchymal cell, embryonic stem cell, induced pluripotent stem cell (iPSC), fibroblast or other tissue specific stem cell. The cell can be immortalized. In some cases, the immortalized cell is a HEK293cell. In some instances, the cell is a differentiated cell. Based on the disclosure provided, it is expected that this system can be used in conjunction with any transgenic line expressing a recombinase in the target cell type of interest to develop AAV capsids that more efficiently transduce that target cell population.

### Methods of Treatment

[0112] Disclosed herein are methods of treating a disease or condition, or a symptom of the disease or condition, in a subject, comprising administrating of therapeutically effective amount of one or more compositions (e.g., rAAV particle, AAV vector, pharmaceutical composition) disclosed herein to the subject. In some embodiments, the composition is a rAAV capsid protein described herein. In some embodiments, the composition is an isolated and purified rAAV capsid protein described herein. In some embodiments, the rAAV particle encapsidates an AAV vector comprising a transgene (e.g., therapeutic nucleic acid). In some embodiments, the composition is a rAAV capsid protein described herein conjugated with a therapeutic agent disclosed herein. In some embodiments, the composition is a pharmaceutical composition comprising the rAAV particle and a pharmaceutically acceptable carrier. In some embodiments, the one or more compositions are administered to the subject alone (e.g., stand-alone therapy). In some embodiments, the composition is a first-line therapy for the disease or condition. In some embodiments, the composition is a second-line, third-line, or fourth-line therapy, for the disease or condition.

[0113] Recombinant adeno-associated virus (rAAV) mediated gene delivery leverages the AAV mechanism of viral transduction for nuclear expression of an episomal heterologous nucleic acid (e.g., a transgene, therapeutic nucleic acid). Upon delivery to a host in vivo environment, a rAAV will (1) bind or attach to cellular surface receptors on the target cell, (2) endocytose, (3) traffic to the nucleus, (4) uncoat the virus to release the encapsidated heterologous nucleic acid, (5) convert of the heterologous nucleic acid from single-stranded to double-stranded DNA as a template for transcription in the nucleus, and (6) transcribe of the episomal heterologous nucleic acid in the nucleus of the host cell (“transduction”). rAAVs engineered to have an increased transduction enrichment (transcription of the episomal heterologous nucleic acid in the host cell) are desirable for gene therapy applications.

[0114] Aspects disclosed herein provide methods of treating a disease or condition in a subject, the method comprising administering to the subject a therapeutically effective amount of the rAAV of the present disclosure, or the pharmaceutical formulation of the present disclosure, wherein the gene product is a therapeutic gene product. In some embodiments, the administering is by intracranial, intraventricular, intracerebroventricular, intravenous, intraarterial, intranasal, intrathecal, intracisternae magna, or subcutaneous.

[0115] Provided here, are methods of treating a disease or a condition associated with an aberrant expression or activity of a target gene or gene expression product thereof, the method comprising modulating the expression or the activity of a target gene or gene expression product in a subject by administering a rAAV encapsidating a heterologous nucleic acid of the present disclosure. In some instances, the expression or the activity of the target gene or gene expression product is decreased, relative to that in a normal (non-diseased) individual; and administering the rAAV to the subject is sufficient to increase the expression of the activity of the target gene or gene expression product. In some instances, the expression or the activity of the gene or gene expression product is increased, relative to that in a normal individual; and administering the rAAV to the subject is sufficient to decrease the expression or the activity of the target gene or gene expression product. In a non-limiting example, a subject diagnosed with Alzheimer's disease, which is caused, in some cases, by a gain-of-function of a Presenilin 1 and/or Presenilin 2 (encoded by the gene PSEN1 and PSEN2, respectively) is administered a rAAV disclosed herein encapsidating a therapeutic nucleic acid that is a silencing RNA (siRNA), or other RNAi with a loss-of-function effect on PSEN1 mRNA.

[0116] Also provided are methods of preventing a disease or condition disclosed herein in a subject comprising administering to the subject a therapeutically effective amount of an rAAV vector comprising a nucleic acid sequence encoding a therapeutic gene expression product described herein. The rAAV vector may be encapsidated in the modified capsid protein or rAAV viral particle described herein. In some instances, the therapeutic gene expression product is effective to modulate the activity or expression of a target gene or gene expression product.

[0117] Disclosed herein are methods of treating a disease or condition in a subject by administering a composition comprising a rAAV disclosed herein. An advantage of the rAAVs disclosed herein, is that the rAAV may be used to treat virtually any disease or condition that would benefit from a transgene therapy, including but not limited to spinal muscular atrophy (SMA), amyotrophic lateral sclerosis (ALS), Parkinson's disease, Pompe disease, mucopolysaccharidosis type II, fragile X syndrome, STXBP1 encephalopathy, Krabbe disease, Huntington's disease, Alzheimer's disease, Battens disease, lysosomal storage disorders, glioblastoma multiforme, Rett syndrome, Leber's congenital amaurosis, Late infantile neuronal ceroid lipofuscinosis (LINCL), chronic pain, stroke, spinal cord injury, traumatic brain injury and lysosomal storage disorders.

[0118] In some cases, the disease or condition is localized to a particular in vivo environment in the subject, e.g., the CNS. The compositions of the present disclosure are particularly useful for the treatment of the diseases or conditions described herein because they specifically or more efficiently target the in vivo environment and deliver a therapeutic nucleic acid engineered to modulate the activity or the expression of a target gene expression product involved with the pathogenesis or pathology of the disease or condition.

[0119] Provided herein are methods of treating a disease or a condition, or a symptom of the disease or condition, in a subject, comprising: (a) diagnosing a subject with a disease or a condition affecting a target in vivo environment; and (b) treating the disease or the condition by administering to the subject a therapeutically effective amount of a composition disclosed herein (e.g., rAAV particle, AAV vector, pharmaceutical composition), wherein the composition is engineered with an increased specificity for the target in vivo environment.

[0120] Disclosed herein are methods of treating a disease or a condition, or a symptom of the disease or the condition, afflicting a target in a subject comprising: (a) administering to the subject a composition (e.g., rAAV particle, AAV vector, pharmaceutical composition); and (b) expressing the therapeutic nucleic acid into a target in vivo environment in the subject with an increased transduction enrichment.

[0121] In some embodiments, methods further comprise reducing or ablating delivery of the heterologous nucleic acid in an off-target in vivo environment, such as the liver. In some embodiments, delivery is characterized by an increase in enrichment of transduction (e.g., of the heterologous nucleic acid) in the CNS.

[0122] In some embodiments, methods of treating a disease or condition affecting the CNS comprise administering a rAAV particle to a CNS in a subject, the rAAV particle comprising an rAAV capsid protein comprising an insertion of about, five, six, or seven amino acids of an amino acid sequence provided in Table 1, FIG. 1 and Formulas I-VII, at an amino acid position 588-589 in a parental AAV capsid protein. In some embodiments, methods of treating a disease or condition affecting the CNS comprise administering a rAAV particle to a CNS in a subject, the rAAV particle comprising an rAAV capsid protein comprising an insertion of about, five, six, or seven amino acids of an amino acid sequence as well as one or more substitution at amino acid found at amino acid positions 587-590 [AQAQ] such as provided in Table 1, FIG. 1 and Formulas I-VII. In some embodiments, the parental AAV capsid protein is AAV9 capsid protein (for e.g., provided in SEQ ID NO: 1.

[0123] Also provided are methods of modulating a target gene expression product, the methods comprising administering to a subject in need thereof a composition (e.g., rAAV particle, AAV vector, pharmaceutical composition) disclosed herein. For example, methods provided herein comprise administering to a subject a rAAV with a rAAV capsid protein encapsidating a viral vector comprising a heterologous nucleic acid that modulates the expression or the activity of the target gene expression product.

[0124] The term “normal individual” refers to an individual that is not afflicted with the disease or the condition characterized by the variation in expression or activity of the gene or gene expression product thereof.

[0125] In some embodiments, the disease or condition of the CNS is selected from Absence of the Septum Pellucidum, Acid Lipase Disease, Acid Maltase Deficiency, Acquired Epileptiform Aphasia, Acute Disseminated Encephalomyelitis, Attention Deficit-Hyperactivity Disorder (ADHD), Adie's Pupil, Adie's Syndrome, Adrenoleukodystrophy, Agenesis of the Corpus Callosum, Agnosia, Aicardi Syndrome, Aicardi-Goutieres Syndrome Disorder, AIDS—Neurological Complications, Alexander Disease, Alpers' Disease, Alternating Hemiplegia, Alzheimer's Disease, Amyotrophic Lateral Sclerosis (ALS), Anencephaly, Aneurysm, Angelman Syndrome, Angiomatosis, Anoxia, Antiphospholipid Syndrome, Aphasia, Apraxia, Arachnoid Cysts, Arachnoiditis, Arnold-Chiari Malformation, Arteriovenous Malformation, Asperger Syndrome, Ataxia, Ataxia Telangiectasia, Ataxias and Cerebellar or Spinocerebellar Degeneration, Atrial Fibrillation and Stroke, Attention Deficit-Hyperactivity Disorder, Autism Spectrum Disorder, Autonomic Dysfunction, Back Pain, Barth Syndrome, Batten Disease, Becker's Myotonia, Behcet's Disease, Bell's Palsy, Benign Essential Blepharospasm, Benign Focal Amyotrophy, Benign Intracranial Hypertension, Bernhardt-Roth Syndrome, Binswanger's Disease, Blepharospasm, Bloch-Sulzberger Syndrome, Brachial Plexus Birth Injuries, Brachial Plexus Injuries, Bradbury-Eggleston Syndrome, Brain and Spinal Tumors, Brain Aneurysm, Brain Injury, Brown-Sequard Syndrome, Bulbospinal Muscular Atrophy, Cerebral Autosomal Dominant Arteriopathy with Subcortical Infarcts and Leukoencephalopathy (CADASIL), Canavan Disease, Carpal Tunnel Syndrome, Causalgia, Cavernomas, Cavernous Angioma, Cavernous Malformation, Central Cervical Cord Syndrome, Central Cord Syndrome, Central Pain Syndrome, Central Pontine Myelinolysis, Cephalic Disorders, Ceramidase Deficiency, Cerebellar Degeneration, Cerebellar Hypoplasia, Cerebral Aneurysms, Cerebral Arteriosclerosis, Cerebral Atrophy, Cerebral Beriberi, Cerebral Cavemous Malformation, Cerebral Gigantism, Cerebral Hypoxia, Cerebral Palsy, Cerebro-Oculo-Facio-Skeletal Syndrome (COFS), Charcot-Marie-Tooth Disease, Charcot-Marie-Tooth syndrome, classical rhizomelic chondrodysplasia punctata (RCDP), Chiari Malformation, Cholesterol Ester Storage Disease, Chorea, Choreoacanthocytosis, Chronic Inflammatory Demyelinating Polyneuropathy (CIDP), Chronic Orthostatic Intolerance, Chronic Pain, Cockayne Syndrome, Cockayne Syndrome Type II, Coffin Lowry Syndrome, Colpocephaly, Coma, Complex Regional Pain Syndrome, Congenital Facial Diplegia, Congenital Myasthenia, Congenital Myopathy, Congenital Vascular Cavernous Malformations, Corticobasal Degeneration, Cranial Arteritis, Craniosynostosis, Cree encephalitis, Creutzfeldt- Jakob Disease, Cumulative Trauma Disorders, Cushing's Syndrome, Cytomegalic Inclusion Body Disease, Cytomegalovirus Infection, Dancing Eyes-Dancing Feet Syndrome, Dandy-Walker Syndrome, Dawson Disease, Deafness, De Morsier's Syndrome, Dejerine-Klumpke Palsy, Dementia, Dementia -Multi -Infarct, Dementia-Semantic, Dementia-Subcortical, Dementia With Lewy Bodies, Dentate Cerebellar Ataxia, Dentatorubral Atrophy, Dermatomyositis, Developmental Dyspraxia, Devic's Syndrome, Diabetic Neuropathy, Diffuse Sclerosis, Dravet Syndrome, Duchenne muscular dystrophy, Dysautonomia, Dysgraphia, Dyslexia, Dysphagia, Dyspraxia, Dyssynergia Cerebellaris Myoclonica, Dyssynergia Cerebellaris Progressiva, Dystonias, Early Infantile Epileptic Encephalopathy, Empty Sella Syndrome, Encephalitis, Encephalitis Lethargica, Encephaloceles, Encephalopathy, Encephalopathy (familial infantile), Encephalotrigeminal Angiomatosis, Epilepsy, Epileptic Hemiplegia, Erb's Palsy, Erb-Duchenne and Dejerine-Klumpke Palsies, Essential Tremor, Extrapontine Myelinolysis, Fabry Disease, Fahr's Syndrome, Fainting, Familial Dysautonomia, Familial Hemangioma, Familial Idiopathic Basal Ganglia Calcification, Familial Periodic Paralyses, Familial Spastic Paralysis, Farber's Disease, Febrile Seizures, Fibromuscular Dysplasia, Fisher Syndrome, Floppy Infant Syndrome, Foot Drop, Fragile X syndrome, Friedreich's Ataxia, Frontotemporal Dementia (FTD), Gaucher Disease, Generalized Gangliosidoses, Gerstmann's Syndrome, Gerstmann-Straussler-Scheinker Disease, Giant Axonal Neuropathy, Giant Cell Arteritis, Giant Cell Inclusion Disease, glioblastoma, Globoid Cell Leukodystrophy, Glossopharyngeal Neuralgia, Glycogen Storage Disease, Guillain-Barre Syndrome, Hallervorden-Spatz Disease, Head Injury, Headache, Hemicrania Continua, Hemifacial Spasm, Hemiplegia Alterans, Hereditary Neuropathies, Hereditary Spastic Paraplegia, Heredopathia Atactica Polyneuritiformis, Herpes Zoster, Herpes Zoster Oticus, Hirayama Syndrome, Holmes-Adie syndrome, Holoprosencephaly, HTLV-1 Associated Myelopathy, Hughes Syndrome, Huntington's Disease, Hydranencephaly, Hydrocephalus, Hydrocephalus—Normal Pressure, Hydromyelia, Hypercortisolism, Hypersomnia, Hypertonia, Hypotonia, Hypoxia, Immune-Mediated Encephalomyelitis, Inclusion Body Myositis, Incontinentia Pigmenti, Infantile Hypotonia, Infantile Neuroaxonal Dystrophy, Infantile Phytanic Acid Storage Disease, Infantile Refsum Disease (IRD), Infantile Spasms, Inflammatory Myopathies, Iniencephaly, Intestinal Lipodystrophy, Intracranial Cysts, Intracranial Hypertension, Isaacs' Syndrome, Joubert Syndrome, Kearns-Sayre Syndrome, Kennedy's Disease, Kinsbourne syndrome, Kleine-Levin Syndrome, Klippel-Feil Syndrome, Klippel-Trenaunay Syndrome (KTS), Kliiver-Bucy Syndrome, Korsakoff s Amnesic Syndrome, Krabbe Disease, Kugelberg-Welander Disease, Kuru, Lambert-Eaton Myasthenic Syndrome, Landau-Kleffner Syndrome, Lateral Femoral Cutaneous Nerve Entrapment, Lateral Medullary Syndrome, Learning Disabilities, Leigh's Disease, Lennox-Gastaut Syndrome, Lesch-Nyhan Syndrome, Leukodystrophy, Levine-Critchley Syndrome, Lewy Body Dementia, Lipid Storage Diseases, Lipoid Proteinosis, Lissencephaly, Locked-In Syndrome, Lou Gehrig's Disease, Lupus -Neurological Sequelae, Lyme Disease—Neurological Complications, Machado-Joseph Disease, Macrencephaly, Maple syrup urine disease, Megalencephaly, Melkersson-Rosenthal Syndrome, Meningitis, Meningitis and Encephalitis, Menkes Disease, Menkes syndrome, Meralgia Paresthetica, Metachromatic Leukodystrophy, Microcephaly, Migraine, Miller Fisher Syndrome, Mini Stroke, Mitochondrial Myopathy, Moebius Syndrome, Monomelic Amyotrophy, Motor Neuron Diseases, Moyamoya Disease, Mucolipidoses, Mucopolysaccharidosis, Mucopolysaccharidosis II, Multi-Infarct Dementia, Multifocal Motor Neuropathy, Multiple Sclerosis, Multiple System Atrophy, Multiple System Atrophy with Orthostatic Hypotension, Muscular Dystrophy, Myasthenia -Congenital, Myasthenia Gravis, Myelinoclastic Diffuse Sclerosis, Myoclonic Encephalopathy of Infants, Myoclonus, Myopathy, Myopathy-Congenital, Myopathy-Thyrotoxic, Myotonia, Myotonia Congenita, Myotonic dystrophy, Narcolepsy, Neuroacanthocytosis, Neurodegeneration with Brain Iron Accumulation, Neurofibromatosis, Neuroleptic Malignant Syndrome, Neurological Complications of AIDS, Neurological Complications of Lyme Disease, Neurological Consequences of Cytomegalovirus Infection, Neurological Manifestations of Pompe Disease, Neurological Sequelae Of Lupus, Neuromyelitis Optica, Neuromyotonia, Neuronal Ceroid Lipofuscinosis, Neuronal Migration Disorders, Neuropathy- Hereditary, Neurosarcoidosis, Neurosyphilis, Neurotoxicity, Nevus Cavernosus, Niemann-Pick Disease, O'Sullivan-McLeod Syndrome, Occipital Neuralgia, Ohtahara Syndrome, Olivopontocerebellar Atrophy, Opsoclonus Myoclonus, Orthostatic Hypotension, Overuse Syndrome, Pain -Chronic, Pantothenate Kinase-Associated Neurodegeneration, Paraneoplastic Syndromes, Paresthesia, Parkinson's Disease, Paroxysmal Choreoathetosis, Paroxysmal Hemicrania, Parry -Romberg, Pelizaeus-Merzbacher Disease, Pena Shokeir II Syndrome, Perineural Cysts, Periodic Paralyses, Peripheral Neuropathy, Periventricular Leukomalacia, Persistent Vegetative State, Pervasive Developmental Disorders, Phenylketonuria, Phytanic Acid Storage Disease, Pick's Disease, Pinched Nerve, Piriformis Syndrome, Pituitary Tumors, Polymyositis, Pompe Disease, Porencephaly, Post-Polio Syndrome, Postherpetic Neuralgia, Postinfectious Encephalomyelitis, Postural Hypotension, Postural Orthostatic Tachycardia Syndrome, Postural Tachycardia Syndrome, Prader-Willi syndrome, Primary Dentatum Atrophy, Primary Lateral Sclerosis, Primary Progressive Aphasia, Prion Diseases, Progressive Hemifacial Atrophy, Progressive Locomotor Ataxia, Progressive Multifocal Leukoencephalopathy, Progressive Sclerosing Poliodystrophy, Progressive Supranuclear Palsy, Prosopagnosia, Pseudo-Torch syndrome, Pseudotoxoplasmosis syndrome, Pseudotumor Cerebri, Psychogenic Movement, Ramsay Hunt Syndrome I, Ramsay Hunt Syndrome II, Rasmussen's Encephalitis, Reflex Sympathetic Dystrophy Syndrome, Refsum Disease, Refsum Disease—Infantile, Repetitive Motion Disorders, Repetitive Stress Injuries, Restless Legs Syndrome, Retrovirus-Associated Myelopathy, Rett Syndrome, Reye's Syndrome, Rheumatic Encephalitis, Riley-Day Syndrome, Sacral Nerve Root Cysts, Saint Vitus Dance, Salivary Gland Disease, Sandhoff Disease, Schilder's Disease, Schizencephaly, Seitelberger Disease, Seizure Disorder, Semantic Dementia, Septo-Optic Dysplasia, Severe Myoclonic Epilepsy of Infancy (SMEI), Shaken Baby Syndrome, Shingles, Shy-Drager Syndrome, Sjogren's Syndrome, Sleep Apnea, Sleeping Sickness, Sotos Syndrome, Spasticity, Spina Bifida, Spinal Cord Infarction, Spinal Cord Injury, Spinal Cord Tumors, Spinal Muscular Atrophy, Spinocerebellar ataxia, Spinocerebellar Atrophy, Spinocerebellar Degeneration, Steele-Richardson-Olszewski Syndrome, Stiff-Person Syndrome, Striatonigral Degeneration, Stroke, Sturge-Weber Syndrome, STXIBPI encephalopathy, Subacute Sclerosing Panencephalitis, Subcortical Arteriosclerotic Encephalopathy, Short-lasting, Unilateral, Neuralgiform (SUNCT) Headache, Swallowing Disorders, Sydenham Chorea, Syncope, Syphilitic Spinal Sclerosis, Syringohydromyelia, Syringomyelia, Systemic Lupus Erythematosus, Tabes Dorsalis, Tangier disease, Tardive Dyskinesia, Tarlov Cysts, Tay-Sachs Disease, Temporal Arteritis, Tethered Spinal Cord Syndrome, Thomsen's Myotonia, Thoracic Outlet Syndrome, Thyrotoxic Myopathy, Tic Douloureux, Todd's Paralysis, Tourette Syndrome, Transient Ischemic Attack, Transmissible Spongiform Encephalopathies, Transverse Myelitis, Traumatic Brain Injury, Tremor, Trigeminal Neuralgia, Tropical Spastic Paraparesis, Troyer Syndrome, Tuberous Sclerosis, Vascular Erectile Tumor, Vasculitis Syndromes of the Central Nervous Systems, Von Economo's Disease, Von Hippel-Lindau Disease (VHL), Von Hippel-Lindau syndrome, Von Recklinghausen's Disease, Wallenberg's Syndrome, Werdnig-Hoffman Disease, Wernicke-Korsakoff Syndrome, West Syndrome, Whiplash, Whipple's Disease, Williams Syndrome, Wilson Disease, Wolman's Disease, X-Linked Spinal and Bulbar Muscular Atrophy and Zellweger syndrome.

[0126] In some embodiments, the pharmaceutical formulation comprises a therapeutic nucleic acid encoding a therapeutic gene expression product. In some instances, the therapeutic gene expression product is effective to modulate an activity or an expression of a target gene or gene expression product selected from ATP1A2, CACNAIA, SETD5, SHANK3, NF2, DNMTI, TCF4, RAI1, PEXI, ARSA, EIF2B5, EIF2B1, EIF2B2, NPC1, ADAR, MFSD8, STXBP1, PRICKLE2, PRRT2, IDUA, STX1B, Sarcoglycan Alpha (SGCA), glutamic acid decarboxylase 65 (GAD65), glutamic acid decarboxylase 67 (GAD67), CLN2, Nerve Growth Factor (NGF), glial cell derived neurotrophic factor (GDNF), Survival Of Motor Neuron 1, STXBP1, Telomeric (SMN1), Factor X (FIX), Retinoid Isomerohydrolase (RPE65), sarco/endoplasmic reticulum Ca2+-ATPase (SERCA2a), Glucocerebrosidase (GCase), galactocerebrosidase (GALC), CDKL5, Frataxin (FXN), Huntingtin (HTT), methyl-CpG binding protein 2 (MECP2), a peroxisomal biogenesis factor (PEX), progranulin (GRN), an antitubulin agent, copper-zinc superoxide dismutase (SODI), iduronate 2 sulfatase (hIDS), Glucosylceramidase Beta (GBA), fragile X mental retardation 1 (FMR1), NPC Intracellular Cholesterol Transporter 1 (NPC1), SCN1A, C9orf72, NPS3 and a NLRP3 inflammasome. In some embodiments, the peroxisomal biogenesis factor (PEX) is selected from PEX1, PEX2, PEX3, PEX4, PEX5, PEX6, PEX7, PEX10, PEX11β, PEX12, PEX13, PEX14, PEX16, PEX19, and PEX26.

[0127] In some aspects, other examples of genes involved in CNS diseases or disorders include MAPT, IDUA, SNCA, ATXN2, Ube3a, GNS, HGSNAT, NAGLU, SGSH, CLN1, CLN3, CLN4, CLN5, CLN6, CLN7, CLN8, CTSD, ABCD1, HEXA, HEXB, ASM, ASPA, GLB1, AADC, MFN2, GNAO1, SYNGAP1, GRIN2A, GRIN2B, KCNQ2, EPM2A, NHLRC1, SLC6A1, SLC13A5, SURF1, GBE1, ATXN1, ATXN3, and ATXN7.

[0128] In some instances, the therapeutic gene expression product comprises gene editing components. In some instances, the gene editing components are selected from an artificial site-specific RNA endonuclease (ASRE), a zinc finger endonuclease (ZFN), a transcription factor like effector nuclease (TALEN), a clustered regularly interspaced short palindromic repeats (CRISPR)/Cas enzyme, and a CRISPR)/Cas guide RNA.

[0129] In some instances, the expression of a gene or expression or activity of a gene expression product is inhibited by the administration of the composition to the subject. In some instances, the expression of a gene or the expression or the activity of a gene expression product is enhanced by the administration of the composition to the subject.

### Formulations, Dosages, and Routes of Administration

[0130] Disclosed herein are methods comprising delivering a rAAV particle encapsidating a heterologous nucleic acid to the CNS in a subject, the rAAV particle comprising (i) an increased transduction of the heterologous nucleic acid in the CNS, wherein the rAAV particle has an rAAV capsid protein comprising an insertion of five, six, or seven amino acids of an amino acid sequence provided in Table 1, FIG. 1 and Formulas I-VI, at an amino acid position 588-589 in a parental AAV capsid protein as well as one or more substitution at amino acid found at amino acid positions 587-590 [AQAQ] such as provided in Table 1, FIG. 1 and Formulas I-VII.

[0131] In general, methods disclosed herein comprise administering a therapeutic rAAV composition by systemic administration. In some instances, methods comprise administering a therapeutic rAAV composition by intravenous (“i.v.”) administration. One may administer therapeutic rAAV compositions by additional routes, such as subcutaneous injection, intramuscular injection, intradermal injection, transdermal injection, percutaneous administration, intranasal administration, intralymphatic injection, rectal administration intragastric administration, intraocular administration, intracerebroventricular administration, intrathecally, intracisternal, or any other suitable parenteral administration. Routes, dosage, time points, and duration of administrating therapeutics may be adjusted. In some embodiments, administration of therapeutics is prior to, or after, onset of either, or both, acute and chronic symptoms of the disease or condition. Other routes of delivery to the CNS include, but are not limited to intracranial administration, lateral cerebroventricular administration, and endovascular administration.

[0132] An effective dose and dosage of pharmaceutical compositions to prevent or treat the disease or condition disclosed herein is defined by an observed beneficial response related to the disease or condition, or symptom of the disease or condition. Beneficial response comprises preventing, alleviating, arresting, or curing the disease or condition, or symptom of the disease or condition. In some embodiments, the beneficial response may be measured by detecting a measurable improvement in the presence, level, or activity, of biomarkers, transcriptomic risk profile, or intestinal microbiome in the subject. An “improvement,” as used herein refers to shift in the presence, level, or activity towards a presence, level, or activity, observed in normal individuals (e.g., individuals who do not suffer from the disease or condition). In instances wherein the therapeutic rAAV composition is not therapeutically effective or is not providing a sufficient alleviation of the disease or condition, or symptom of the disease or condition, then the dosage amount and/or route of administration may be changed, or an additional agent may be administered to the subject, along with the therapeutic rAAV composition. In some embodiments, as a patient is started on a regimen of a therapeutic rAAV composition, the patient is also weaned off (e.g., step-wise decrease in dose) a second treatment regimen.

[0133] In some cases, a dose of the pharmaceutical composition may comprise a concentration of infectious particles of at least or about 10⁷, 10⁸, 10⁹, 10¹⁰, 10¹¹, 10¹², 10¹³, 10¹⁴, 10¹⁵, 10¹⁶, or 10¹⁷. In some cases, the concentration of infectious particles is 2×10⁷, 2×10⁸, 2×10⁹, 2×10¹⁰, 2×10¹¹, 2×10¹², 2×10¹³, 2×10¹⁴, 2×10¹⁵, 2×10¹⁶, or 2×10¹⁷. In some cases, the concentration of the infectious particles is 3×10⁷, 3×10⁸, 3×10⁹, 3×10¹⁰, 3×10¹¹, 3×10¹², 3×10¹³, 3×10¹⁴, 3×10¹⁵, 3×10¹⁶, or 3×10¹⁷. In some cases, the concentration of the infectious particles is 4×10⁷, 4×10⁸, 4×10⁹, 4×10¹⁰, 4×10¹¹, 4×10¹², 4×10¹³, 4×10¹⁴, 4×10¹⁵, 4×10¹⁶, or 4×10¹⁷. In some cases, the concentration of the infectious particles is 5×10⁷, 5×10⁸, 5×10⁹, 5×10¹⁰, 5×10¹¹, 5×10¹², 5×10¹³, 5×10¹⁴, 5×10¹⁵, 5×10¹⁶, or 5×10¹⁷. In some cases, the concentration of the infectious particles is 6×10⁷, 6×10⁸, 6×10⁹, 6×10¹⁰, 6×10¹¹, 6×10¹², 6×10¹³, 6×10¹⁴, 6×10¹⁵, 6×10¹⁶, or 6×10¹⁷. In some cases, the concentration of the infectious particles is 7×10⁷, 7×10⁸, 7×10⁹, 7×10¹⁰, 7×10¹¹, 7×10¹², 7×10¹³, 7×10¹⁴, 7×10¹⁵, 7×10¹⁶, or 7×10¹⁷. In some cases, the concentration of the infectious particles is 8×10⁷, 8×10⁸, 8×10⁹, 8×10¹⁰, 8×10¹¹, 8×10¹², 8×10¹³, 8×10¹⁴, 8×10¹⁵, 8×10¹⁶, or 8×10¹⁷. In some cases, the concentration of the infectious particles is 9×10⁷, 9×10⁸, 9×10⁹, 9×10¹⁰, 9×10¹¹, 9×10¹², 9×10¹³, 9×10¹⁴, 9×10¹⁵, 9×10¹⁶, or 9×10¹⁷.

[0134] Disclosed herein, in some embodiments are formulations of pharmaceutically-acceptable excipients and carrier solutions suitable for delivery of the rAAV compositions described herein, as well as suitable dosing and treatment regimens for using the particular compositions described herein in a variety of treatment regimens. In some embodiments, the amount of therapeutic gene expression product in each therapeutically-useful composition may be prepared is such a way that a suitable dosage will be obtained in any given unit dose of the compound. Factors such as solubility, bioavailability, biological half-life, route of administration, product shelf life, as well as other pharmacological considerations will be contemplated by one skilled in the art of preparing such pharmaceutical formulations, and as such, a variety of dosages and treatment regimens may be desirable.

[0135] In some embodiments, the pharmaceutical forms of the rAAV-based viral compositions suitable for injectable use include sterile aqueous solutions or dispersions and sterile powders for the extemporaneous preparation of sterile injectable solutions or dispersions. The carrier can be a solvent or dispersion medium containing, for example, water, ethanol, polyol (e.g., glycerol, propylene glycol, and liquid polyethylene glycol, and the like), suitable mixtures thereof, and/or vegetable oils. Proper fluidity may be maintained, for example, by the use of a coating, such as lecithin, by the maintenance of the required particle size in the case of dispersion and by the use of surfactants. The prevention of the action of microorganisms can be brought about by various antibacterial and antifungal agents, for example, parabens, chlorobutanol, phenol, sorbic acid, thimerosal, and the like. In many cases, it will be preferable to include isotonic agents, for example, sugars or sodium chloride.

[0136] In some cases, for administration of an injectable aqueous solution, the solution may be suitably buffered, if necessary, and the liquid diluent first rendered isotonic with sufficient saline or glucose. These particular aqueous solutions are especially suitable for intravenous, intramuscular, subcutaneous and intraperitoneal administration. Some variation in dosage will necessarily occur depending on the condition of the subject being treated. The person responsible for administration will, in any event, determine the appropriate dose for the individual subject. Moreover, for human administration, preparations should meet sterility, pyrogenicity, and the general safety and purity standards as required by FDA Office of Biologics standards.

[0137] Disclosed herein are sterile injectable solutions comprising the rAAV compositions disclosed herein, which are prepared by incorporating the rAAV compositions disclosed herein in the required amount in the appropriate solvent with several of the other ingredients enumerated above, as required, followed by filtered sterilization. Generally, dispersions are prepared by incorporating the various sterilized active ingredients into a sterile vehicle which contains the basic dispersion medium and the required other ingredients from those enumerated above. In the case of sterile powders for the preparation of sterile injectable solutions, the preferred methods of preparation are vacuum-drying and freeze-drying techniques which yield a powder of the active ingredient plus any additional desired ingredient from a previously sterile-filtered solution thereof. Injectable solutions may be advantageous for systemic administration, for example by intravenous or intrathecal administration.

[0138] Suitable dose and dosage administrated to a subject is determined by factors including, but not limited to, the particular therapeutic rAAV composition, disease condition and its severity, the identity (e.g., weight, sex, age) of the subject in need of treatment, and can be determined according to the particular circumstances surrounding the case, including, e.g., the specific agent being administered, the route of administration, the condition being treated, and the subject or host being treated.

[0139] The amount of rAAV compositions and time of administration of such compositions will be within the purview of the skilled artisan having benefit of the present teachings. It is likely, however, that the administration of therapeutically-effective amounts of the disclosed compositions may be achieved by a single administration, for example, a single injection of sufficient numbers of infectious particles to provide therapeutic benefit to the patient undergoing such treatment. This is made possible, at least in part, by the fact that certain target cells (e.g., neurons) do not divide, obviating the need for multiple or chronic dosing.

[0140] In certain embodiments, the data obtained from cell culture assays and animal studies are used in formulating the therapeutically effective daily dosage range and/or the therapeutically effective unit dosage amount for use in mammals, including humans. In certain embodiments, the dosage range and/or the unit dosage amount varies within this range depending upon the dosage form employed and the route of administration utilized.

### Combination Therapies

[0141] A therapeutic rAAV may be used alone or in combination with an additional therapeutic agent (together, “therapeutic agents”). In some cases, a therapeutic rAAV as used herein is administered alone. The therapeutic agent may be administered together or sequentially in a combination therapy. The combination therapy may be administered within the same day, or may be administered one or more days, weeks, months, or years apart.

[0142] The additional therapeutic agent can comprise a small molecule. The additional therapeutic agent can comprise an antibody, or antigen-binding fragment. The additional therapeutic agent can include lipid nanoparticle-based therapies, anti-sense oligonucleotide therapies, as well as other viral therapies.

[0143] The additional therapeutic agent can comprise a cell-based therapy. Exemplary cell-based therapies include without limitation immune effector cell therapy, chimeric antigen receptor T-cell (CAR-T) therapy, natural killer cell therapy and chimeric antigen receptor natural killer (NK) cell therapy. Either NK cells, or CAR-NK cells, or a combination of both NK cells and CAR-NK cells can be used in combination with the methods disclosed herein. In some embodiments, the NK cells and CAR-NK cells are derived from human induced pluripotent stem cells (iPSC), umbilical cord blood, or a cell line. The NK cells and CAR-NK cells can comprise a cytokine receptor and a suicide gene. The cell-based therapy can comprise a stem cell therapy. The stem cell therapy may be embryonic or somatic stem cells. The stem cells may be isolated from a donor (allogeneic) or isolated from the subject (autologous). The stem cells may be expanded adipose-derived stem cells (eASCs), hematopoietic stem cells (HSCs), mesenchymal stem (stromal) cells (MSCs), or induced pluripotent stem cells (iPSCs) derived from the cells of the subject.

### Kits

[0144] Disclosed herein are kits comprising compositions disclosed herein. Also disclosed herein are kits for the treatment or prevention of a disease or conditions of the CNS. In some instances, the disease or condition is cancer, a pathogen infection, pulmonary disease or condition, neurological disease, muscular disease, or an immune disorder, such as those described herein.

[0145] In one embodiment, a kit can include a therapeutic or prophylactic composition containing an effective amount of a composition of a rAAV particle encapsidating a recombinant AAV vector encoding a therapeutic nucleic acid (e.g., therapeutic nucleic acid) and a recombinant AAV (rAAV) capsid protein of the present disclosure. In another embodiment, a kit can include a therapeutic or prophylactic composition containing an effective amount of cells modified by the rAAV described herein (“modified cell”), in unit dosage form that express therapeutic nucleic acid. In some embodiments, a kit comprises a sterile container which can contain a therapeutic composition; such containers can be boxes, ampules, bottles, vials, tubes, bags, pouches, blister-packs, or other suitable container forms known in the art. Such containers can be made of plastic, glass, laminated paper, metal foil, or other materials suitable for holding medicaments.

[0146] In some instances, the kit further comprises a cell. In some instances, the cell is mammalian. In some instances, the cell is immortalized. In some instances, the immortalized cell is an embryonic stem cell. In some instances, the embryonic stem cell is a human embryonic stem cell. In some instances, the human embryonic stem cell is a human embryonic kidney 293 (HEK-293) cell. In some instances, the kit further comprises an AAV vector comprising a heterologous nucleic acid encoding a therapeutic gene expression product. In some instances, the AAV vector is an episome.

[0147] In some cases, rAAV are provided together with instructions for administering the rAAV to a subject having or at risk of developing the disease or condition (e.g., disease of the CNS). Instructions can generally include information about the use of the composition for the treatment or prevention of the disease or condition.

[0148] In some cases, the instructions include at least one of the following: description of the therapeutic rAAV composition, dosage schedule and administration for treatment or prevention of the disease or condition disclosed herein; precautions; warnings; indications; counter-indications; overdosage information; adverse reactions; animal pharmacology; clinical studies; and/or references. The instructions can be printed directly on the container (when present), or as a label applied to the container, or as a separate sheet, pamphlet, card, or folder supplied in or with the container. In some cases, instructions provide procedures for administering the rAAV to the subject alone. In some instances, the instructions provide that the rAAV is formulated for systemic delivery.

### Definitions

[0149] The terminology used herein is for the purpose of describing particular cases only and is not intended to be limiting. As used herein, the singular forms “a”, “an” and “the” are intended to include the plural forms as well, unless the context clearly indicates otherwise. Furthermore, to the extent that the terms “including”, “includes”, “having”, “has”, “with”, or variants thereof are used in either the detailed description and/or the claims, such terms are intended to be inclusive in a manner similar to the term “comprising.”

[0150] The term “about” or “approximately” means within an acceptable error range for the particular value as determined by one of ordinary skill in the art, which will depend in part on how the value is measured or determined, e.g., the limitations of the measurement system. For example, “about” can mean within 1 or more than 1 standard deviation, per the practice in the given value. Where particular values are described in the application and claims, unless otherwise stated the term “about” should be assumed to mean an acceptable error range for the particular value.

[0151] As used herein “consisting essentially of” when used to define compositions and methods, shall mean excluding other elements of any essential significance to the combination for the stated purpose. Thus, a composition consisting essentially of the elements as defined herein would not exclude other materials or steps that do not materially affect the basic and novel characteristic(s) of the claimed disclosure, such as compositions for treating skin disorders like acne, eczema, psoriasis, and rosacea.

[0152] The terms “homologous,” “homology,” or “percent homology” are used herein to generally mean an amino acid sequence or a nucleic acid sequence having the same, or similar sequence to a reference sequence. Percent homology of sequences can be determined using the most recent version of BLAST, as of the filing date of this application.

[0153] The terms “increased,” or “increase” are used herein to generally mean an increase by a statically significant amount. In some embodiments, the terms “increased,” or “increase,” mean an increase of at least 10% as compared to a reference level, for example an increase of at least about 10%, at least about 20%, or at least about 30%, or at least about 40%, or at least about 50%, or at least about 60%, or at least about 70%, or at least about 80%, or at least about 90% or up to and including a 100% increase or any increase between 10-100% as compared to a reference level, standard, or control. Other examples of “increase” include an increase of at least 2-fold, at least 5-fold, at least 10-fold, at least 20-fold, at least 50-fold, at least 100-fold, at least 1000-fold or more as compared to a reference level.

[0154] The terms, “decreased” or “decrease” are used herein generally to mean a decrease by a statistically significant amount. In some embodiments, “decreased” or “decrease” means a reduction by at least 10% as compared to a reference level, for example a decrease by at least about 20%, or at least about 30%, or at least about 40%, or at least about 50%, or at least about 60%, or at least about 70%, or at least about 80%, or at least about 90% or up to and including a 100% decrease (e.g., absent level or non-detectable level as compared to a reference level), or any decrease between 10-100% as compared to a reference level. In the context of a marker or symptom, by these terms is meant a statistically significant decrease in such level. The decrease can be, for example, at least 10%, at least 20%, at least 30%, at least 40% or more, and is preferably down to a level accepted as within the range of normal for an individual without a given disease.

[0155] The terms “subject” is any organism. In some instances, the organism is a mammal. Non-limiting examples of mammal include, any member of the mammalian class: humans, non-human primates such as chimpanzees, and other apes and monkey species; farm animals such as cattle, horses, sheep, goats, swine; domestic animals such as rabbits, dogs, and cats; laboratory animals including rodents, such as rats, mice and guinea pigs, and the like. In one aspect, the mammal is a human. The term “animal” as used herein comprises human beings and non-human animals. In one embodiment, a “non-human animal” is a mammal, for example a rodent such as rat or a mouse. In one embodiment, a “non-human primate” is a mammal, for example a monkey. In some instances, the subject is a patient, which as used herein, may refer to a subject diagnosed with a particular disease or disorder.

[0156] The term “gene,” as used herein, refers to a segment of nucleic acid that encodes an individual protein or RNA (also referred to as a “coding sequence” or “coding region”), optionally together with associated regulatory region such as promoter, operator, terminator and the like, which may be located upstream or downstream of the coding sequence.

[0157] The term “adeno-associated virus,” or “AAV” as used herein refers to the adeno-associated virus or derivatives thereof. Non-limited examples of AAV's include AAV type 1 (AAV1), AAV type 2 (AAV2), AAV type 3 (AAV3), AAV type 4 (AAV4), AAV type 5 (AAV5), AAV type 6 (AAV6), AAV type 7 (AAV7), AAV type 8 (AAV8), AAV type 9 (AAV9), AAV type 10 (AAV10), AAV type 11 (AAV11), AAV type 12 (AAV12), avian AAV, bovine AAV, canine AAV, equine AAV, primate AAV, non-primate AAV, and ovine AAV. In some instances, the AAV is described as a “Primate AAV,” which refers to AAV that infect primates. Likewise an AAV may infect bovine animals (e.g., “bovine AAV”, and the like). In some instances, the AAV is wildtype, or naturally occurring. In some instances, the AAV is recombinant.

[0158] The term “AAV capsid” as used herein refers to a capsid protein or peptide of an adeno-associated virus. In some instances, the AAV capsid protein is configured to encapsidate genetic information (e.g., a transgene, therapeutic nucleic acid, viral genome). In some instances, the AAV capsid of the instant disclosure is a modified AAV capsid, relative to a corresponding parental AAV capsid protein.

[0159] The term “tropism” as used herein refers to a quality or characteristic of the AAV capsid that may include specificity for, and/or an increase or a decrease in enrichment of, expressing the encapsidated genetic information into an in vivo environment, relative to a second in vivo environment. An in vivo environment, in some instances, is a cell-type. An in vivo environment, in some instances, is an organ or organ system.

[0160] The term “AAV vector” as used herein refers to nucleic acid polymer encoding genetic information related to the virus. The AAV vector may be a recombinant AAV vector (rAAV), which refers to an AAV vector generated using recombinatorial genetics methods. In some instances, the rAAV vector comprises at least one heterologous polynucleotide (e.g., a polynucleotide other than a wild-type or naturally occurring AAV genome such as a transgene).

[0161] The term “AAV particle” as used herein refers to an AAV virus, virion, AAV capsid protein or component thereof. In some cases, the AAV particle is modified relative to a parental AAV particle.

[0162] The term “gene product” of “gene expression product” refers to an expression product of a polynucleotide sequence such as, for e.g., a polypeptide, peptide, protein or RNA, including interfering RNA (e.g., siRNA, miRNA, shRNA) and messenger RNA (mRNA).

[0163] The term “heterologous” as used herein refers to a genetic element (e.g., coding region) or gene expression product (e.g., RNA, protein) that is derived from a genotypically distinct entity from that of the rest of the entity to which it is being compared.

[0164] The term “endogenous” as used herein refers to a genetic element (e.g., coding region) or gene expression product (e.g., RNA, protein) that is naturally occurring in or associated with an organism or a particular cell within the organism.

[0165] The terms “treat,” “treating,” and “treatment” as used herein refers to alleviating or abrogating a disorder, disease, or condition; or one or more of the symptoms associated with the disorder, disease, or condition; or alleviating or eradicating a cause of the disorder, disease, or condition itself. Desirable effects of treatment can include, but are not limited to, preventing occurrence or recurrence of disease, alleviation of symptoms, diminishing any direct or indirect pathological consequences of the disease, preventing metastasis, decreasing the rate of disease progression, amelioration or palliation of the disease state and remission or improved prognosis.

[0166] The term “therapeutically effective amount” refers to the amount of a compound or therapy that, when administered, is sufficient to prevent development of, or alleviate to some extent, one or more of the symptoms of a disorder, disease, or condition of the disease; or the amount of a compound that is sufficient to elicit biological or medical response of a cell, tissue, system, animal, or human that is being sought by a researcher, veterinarian, medical doctor, or clinician.

[0167] The term “pharmaceutically acceptable carrier,” “pharmaceutically acceptable excipient,” “physiologically acceptable carrier,” or “physiologically acceptable excipient” refers to a pharmaceutically acceptable material, composition, or vehicle, such as a liquid or solid filler, diluent, excipient, solvent, or encapsulating material. A component can be “pharmaceutically acceptable” in the sense of being compatible with the other ingredients of a pharmaceutical formulation. It can also be suitable for use in contact with the tissue or organ of humans and animals without excessive toxicity, irritation, allergic response, immunogenicity, or other problems or complications, commensurate with a reasonable benefit/risk ratio. See, Remington. The Science and Practice of Pharmacy, 21st Edition; Lippincott Williams & Wilkins: Philadelphia, PA, 2005; Handbook of Pharmaceutical Excipients, 5th Edition; Rowe et al., Eds., The Pharmaceutical Press and the American Pharmaceutical Association: 2005; and Handbook of Pharmaceutical Additives, 3rd Edition; Ash and Ash Eds., Gower Publishing Company: 2007; Pharmaceutical Preformulation and Formulation, Gibson Ed., CRC Press LLC: Boca Raton, FL, 2004).

[0168] The term “pharmaceutical composition” refers to a mixture of a compound disclosed herein with other chemical components, such as diluents or carriers. The pharmaceutical composition can facilitate administration of the compound to an organism. Multiple techniques of administering a compound exist in the art including, but not limited to, systemic administration.

[0169] Non-limiting examples of “sample” include any material from which nucleic acids and/or proteins can be obtained. As non-limiting examples, this includes whole blood, peripheral blood, plasma, serum, saliva, mucus, urine, semen, lymph, fecal extract, cheek swab, cells or other bodily fluid or tissue, including but not limited to tissue obtained through surgical biopsy or surgical resection. Alternatively, a sample can be obtained through primary patient derived cell lines, or archived patient samples in the form of preserved samples, or fresh frozen samples.

[0170] The term “in vivo” is used to describe an event that takes place in a subject's body.

[0171] The term “in vitro” is used to describe an event that takes places contained in a container for holding laboratory reagent such that it is separated from the biological source from which the material is obtained. In vitro assays can encompass cell-based assays in which living or dead cells are employed. In vitro assays can also encompass a cell-free assay in which no intact cells are employed.

[0172] The term “CNS” or “central nervous system” means a tissue selected from brain, thalamus, cortex, putamen, lateral ventricles, medulla, the pons, the amygdala, the motor cortex, caudate, hypothalamus, striatum, ventral midbrain, neocortex, basal ganglia, hippocampus, cerebrum, cerebellum, brain stem, and spinal cord. The brain includes a variety of cortical and subcortical areas, including the frontal, temporal, occipital and parietal lobes.

[0173] The term “systemic delivery” is defined as a route of administration of medication or other substance into a circulatory system so that the entire body is affected. Administration can take place via enteral administration (absorption of the drug through the gastrointestinal tract) or parenteral administration (generally injection, infusion, or implantation). “Circulatory system” includes both blood or cerebrospinal fluid circulatory systems. Examples of systemic administration for the CNS include intraarterial, intravenous or intrathecal injection. Other examples include administration to the cerebrospinal fluid at any location, in the spine (i.e. but not limited to lumbar) or brain (i.e. but not limited to cisterna magna). The terms “systemic administration” and “systemic delivery” are used interchangeably.

[0174] The section headings used herein are for organizational purposes only and are not to be construed as limiting the subject matter described.

### EXAMPLES

### Example 1

### Method of Identifying the Modified Capsid Proteins in African Green Monkey

[0175] Of primary concern for the therapeutic applicability of engineered adeno-associated viruses (AAVs) is how well their transduction profiles translate to human application. While previous engineering efforts have focused on in vitro or in vivo rodent screening platforms due to the ease and flexibility of their use, screening efforts directly in non-human primates (NHPs) are much more likely to identify viruses that translate. African Green Monkeys, an old world NHP were selected for the engineering efforts that supported development of the present invention. Engineering efforts were primarily directed on a region of the AAV9 capsid surface located at amino acid position 588, one of the most exposed loops on the capsid surface that is a variable region between natural AAV serotypes and has a role in receptor binding. Insertion of peptides between positions 588 and 589 has been studied in the past by the present inventors, and others, and has resulted in novel receptor binding (AAV-PHP.B/AAV-PHP.eB binding of Ly6a on rodent brain endothelium to facilitate blood-brain barrier crossing and high transduction of the brain) and drastically altered capsid tropism. A library of viral capsids was created by performing a random 7 amino acid insertion at this site within AAV9 in hopes of achieving a novel tropism toward the NHP CNS.

[0176] Plasmids. The first-round viral DNA library was generated by amplification of a section of the AAV9 capsid genome between amino acids 450-599 using NNK degenerate primers (Integrated DNA Technologies, Inc., IDT) to insert seven random amino acids between amino acids 588 and 589 with all possible variations. The resulting library inserts were then introduced into the rAAV-ΔCap-in-rev-RNA plasmid via Gibson assembly as previously described. The resulting capsid DNA library, rAAV-Cap-Cag-GFP11, contained a diversity of -1.28 billion variants at the amino acid level. The second round viral DNA library was generated similarly to the first round, but instead of NNK degenerate primers inserted at the 588, a synthesized oligo pool (Twist Biosicence) was used to generate only selected variants in a UBC-Cap-DNA and CAG-Cap-DNA construct with CAP. This second-round DNA library contained a diversity from 3000-15,000 variants at the amino acid level with 2-6 barcoded replicates for each variant.

[0177] The AAV2/9 REP-AAP-ACAP plasmid transfected into HEK293T cells to provide the Rep gene for library viral production prevents production of a wild-type AAV9 capsid during viral library production after a plausible recombination event between this plasmid co-transfected with the library plasmids at each stage containing the library inserts.

[0178] Viral production. Recombinant AAVs were generated according to established protocols. Briefly, immortalized HEK293T cells (ATCC) were quadruple transfected with four vectors using polyethylenimine (PEI). The first vector was the rAAV-Cap-in-cis-Lox library flanked by inverted terminal repeat (ITR) sequences from a parental AAV virus. The second vector was the AAV2/9 REP-AAP-ACAP plasmid. The third vector contains nucleic acids encoding helper virus proteins needed for viral assembly and packaging of the heterologous nucleic acid into the modified capsid structure. The fourth is a pUC-18 plasmid included to achieve the right PEI/DNA ratio for optimal transfection enrichment. Only 10 ng of rAAV-Cap-in-cis-Lox library DNA was transfected (per 150 mm plate) to decrease the likelihood of multiple library DNAs entering the same cell. Viral particles are harvested from the cells and media after 60 h post transfection. Virus present in the media is concentrated by precipitation with 8% polyethylene glycol and 500 mM sodium chloride and the precipitated virus is added to the lysates prepared from the collected cells. The viruses are purified over iodixanol (Optiprep, Sigma) step gradients (15%, 25%, 40%, and 60%). Viruses are concentrated and formulated in PBS. Virus titers are determined by measuring the number of DNaseI-resistant vector genome copies (VGs) using qPCR and the linearized genome plasmid as a control.

[0179] Animals. African Green Monkey procedures were approved by the IACUC committee of Virscio, Inc. African Green monkeys were born and raised in Virscio, Inc. colonies and housed under standard conditions. They were fed ad libitum and received enrichment as part of the primate enrichment program for NHPs at Virscio, Inc. For AAV infusions, animals were screened for endogenous neutralizing antibodies (nAb). None of the animals that were screened showed any detectible blocking reaction at 1:5 dilution of serum. The day before infusion the animals' food was removed. The test article was administered via intravenous infusion or lumbar intrathecal dosing. Activity and behavior were monitored daily over the course of in-life.

[0180] DNA/RNA recovery and sequencing. Round 1 and round 2 viral libraries were injected into marmosets at a dose of African Green Monkeys at a dose of between 5×10¹² to 1×10¹³ vg/kg animal and rAAV genomes were recovered three weeks post injection. Animals were euthanized and brain (both round 1 and round 2), spinal cord (round 1 and round 2) and liver (round 1 and round 2) were recovered, snap frozen, and placed into long-term storage at −80° C. as well as other peripheral tissues such as heart, spleen, adrenal, kidney, and quad. For round 1, the brain was separated into eleven brain regions, 20 mg each, and for round 2, eleven brain regions. 20-300 mg of each brain section, spinal cord, and liver was homogenized in buffer using the MagMAX DNA ULTRA (A25597) and a Bead Ruptor 96 (OMNI, INC) and viral DNA was isolated according to the manufacturers recommended protocol. Recovered viral DNA was treated with RNase, and purified with a Zymo DNA Clean and Concentrator kit (D4033). Viral genomes were enriched by 25 cycles of PCR amplification with primers flanking the 588-589 insertion site in the capsid genome using 50% of the total extracted viral DNA as a template. After Zymo DNA purification, samples were diluted 1:10 to 1:1000 depending on tissue type and each dilution further amplified around the library variable region with 10 cycles of PCR. Subsequently, samples were further amplified using custom primers with Illumina Indices for 10 more cycles. The amplification products were run on a 2% low-melting point agarose gel (ThermoFisher Scientific, 16520050) for better separation and recovery of the 210 bp band.

[0181] For the second round library only, packaged viral library DNA was isolated from the injected viral library by digestion of the viral capsid and purification of the contained ssDNA. These viral genomes were amplified by two PCR amplification steps, like the viral DNA extracted from tissue, to add adapters and indices for Illumina next-generation sequencing, and purified after gel electrophoresis. This viral library DNA, along with the viral DNA extracted from tissue, was sent for deep sequencing using an Illumina NextSeq 2000 system.

[0182] NGS data alignment and processing. Raw fastq files from NGS runs were processed with custom-built scripts (Capsida CapSeq Tools). For the first round library, the pipeline to process these datasets involved filtering to remove low-quality reads, utilizing a quality score for each sequence, and eliminating bias from PCR-induced mutations or high GC-content. The filtered dataset was then aligned by a perfect string match algorithm and trimmed to improve the alignment quality. Read counts for each sequence were pulled out and displayed by tissue, at which point all sequences found in the brain were compiled for formation of the second round library.

[0183] For the second round library read counts by tissue were similarly tabulated. Then, a read count of 1 was added to each sequence to remove 0 values, all brain regions for each sequence were summed together, and the read sequences for each codon replicate of a given 7-mer amino acid sequence were summed together to give a single value for each peptide insertion. Finally, the data was log 10 counts per million (Cpm) normalized. Enrichment values were calculated with normalized cpm of brain vs cpm of virus and converted to log 10.

[0184] While preferred embodiments of the present invention have been shown and described herein, it will be obvious to those skilled in the art that such embodiments are provided by way of example only. Numerous variations, changes, and substitutions will now occur to those skilled in the art without departing from the invention. It should be understood that various alternatives to the embodiments of the invention described herein may be employed in practicing the invention. It is intended that the following claims define the scope of the invention and that methods and structures within the scope of these claims and their equivalents be covered thereby.

[0185] All publications, patents, and patent applications mentioned in this specification are herein incorporated by reference to the same extent as if each individual publication, patent, or patent application was specifically and individually indicated to be incorporated by reference.

What is claimed is:

1. An AAV capsid protein comprising a sequence as provided in Table 1 or FIG. 1.

2. An AAV capsid comprising an insertion sequence of Formula I
(I)
(SEQ ID NO: 2)
X¹-N-X²-X³-X⁴-X⁵-X⁶
wherein X¹ is an amino acid selected from A, S, G, N, L, Y, H, D, E, Q, P, T and V; X² is an amino acid selected from Q, S, V, T, N, H and A; X³ is an amino acid selected from I, V and T; X⁴ is an amino acid selected from K and R; X⁵ is an amino acid selected from N, V, P, I, T, S, Q, A, L and G; and X⁶ is an amino acid selected from I, S, T, L, V, M, Y, F, A and N.

3. The AAV capsid protein of claim 2, wherein X⁴ is K.

4. The AAV capsid protein of claim 2, wherein X⁴ is R.

5. The AAV capsid protein of claim 2, wherein X³ is V.

6. The AAV capsid protein of claim 2, wherein X³ is T.

7. The AAV capsid protein of claim 2, wherein X³ is I.

8. The AAV capsid protein of claim 2, wherein X² is Q.

9. The AAV capsid protein of claim 2, wherein X¹ is an amino acid selected from A, S, G, N, L, Y, D, E, Q, P, T and V.

10. The AAV capsid protein of claim 2, wherein X³ is T or I when X¹ is A.

11. The AAV capsid protein of claim 2, wherein X³ is T or I when X¹ is N.

12. The AAV capsid protein of claim 2, wherein X² is an amino acid selected from Q, S, V, T, N, H and A when X¹ is D.

13. The AAV capsid protein of claim 2, wherein X² is an amino acid selected from Q, S, T, N, H and A.

14. The AAV capsid protein of claim 2, wherein X⁶ is an amino acid selected from I, S, T, L, V, Y, A and N.

15. An AAV capsid protein comprising an insertion sequence of Formula II
(II)
(SEQ ID NO: 3)
X⁷-N-H-V-R-X⁸-X⁹
wherein X⁷ is an amino acid selected from A, S, G, N, L, Y, H, D, E, Q, P, T and V; X⁸ is an amino acid selected from N, V, P, I, T, S, Q, A, L and G; and X⁹ is an amino acid selected from I, S, T, L, V, M, Y, F, A and N.

16. An AAV capsid protein comprising an AAV capsid protein comprising an insertion sequence of Formula III
(III)
(SEQ ID NO: 4)
X¹⁰-N-V-X¹¹-X¹²-X¹³-X¹⁴
wherein X¹⁰ is an amino acid selected from A, S, G, N, L, Y, H, D, E, Q, P, T and V; X¹¹ is an amino acid selected from V and T; X¹² is an amino acid selected from K and R; X¹³ is an amino acid selected from N, V, P, I, T, S, Q, A, L and G; and X⁴ is an amino acid selected from I, S, T, L, V, M, Y, F, A and N.

17. An AAV capsid protein comprising an AAV capsid protein comprising an insertion sequence of Formula IV
(IV)
(SEQ ID NO: 5)
X¹⁵-N-T-X¹⁶-X¹⁷-X¹⁸-X¹⁹
wherein X¹⁵ is an amino acid selected from A, S, G, N, L, Y, H, D, E, Q, P, T and V; X¹⁶ is an amino acid selected from I, V and T; X¹⁷ is an amino acid selected from K and R;
X¹a is an amino acid selected from N, V, P, I, T, S, Q, A, L and G; and X¹⁹ is an amino acid selected from I, S, T, L, V, M, Y, F, A and N.

18. An AAV capsid protein comprising an AAV capsid protein comprising an insertion sequence of Formula V
(V)
(SEQ ID NO: 6)
X²⁰-N-X²¹-V-R-X²²-X²³
wherein X²⁰ is an amino acid selected from A, S, G, N, L, Y, H, D, E, Q, P, T and V; X²¹ is an amino acid selected from Q, S, V, T, N, H and A; X²² is an amino acid selected from N, V, P, I, T, S, Q, A and L; and X²³ is an amino acid selected from I, S, T, L, V, M, Y, F and A.

19. An AAV capsid protein comprising an AAV capsid protein comprising an insertion sequence of Formula VI
(VI)
(SEQ ID NO: 7)
X²⁴-N-X²⁵-T-K-X²⁶-X²⁷
wherein X²⁴ is an amino acid selected from A, S, L, N, H, D, E, P, T and V; X²⁵ is an amino acid selected from Q, S, V, T and N; X²⁶ is an amino acid selected from N, V, P, T, S, Q and G; and X²⁷ is an amino acid selected from I, S, T, L, V, M, Y, F, A and N.

20. The AAV capsid protein of claim 19, wherein X²⁴ is V, N, L and E.

21. An AAV capsid protein comprising an insertion sequence of Formula VII
(VII)
(SEQ ID NO: )
X²⁸-N-X²⁹-T-R-X³⁰-X³¹
wherein X²⁸ is an amino acid selected from A, S, G, N, L, H, P, T and V; X²⁹ is an amino acid selected from Q, S, V, T and H; X³⁰ is an amino acid selected from N, V, T, S, Q, L and G; and X³¹ is an amino acid selected from I, S, T, V, M, Y, F, A and N.

22. The AAV capsid protein of claim 21, wherein X²⁹ is T or Q.

23. The AAV capsid protein of claim 21, wherein X³¹ is an amino acid selected from T, V and N.

24. The AAV capsid protein of claim 1, wherein the sequence is selected from GNTTRVT (SEQ ID NO: 9), LNSVRNT (SEQ ID NO: 10), NNNTKPS (SEQ ID NO: 11), GNSIKVV (SEQ ID NO: 12), GNSVRIS (SEQ ID NO: 13), ENHVRSS (SEQ ID NO: 14), SNTTRQT (SEQ ID NO: 15), TNSVKAT (SEQ ID NO: 16), GNTTRLV (SEQ ID NO: 17), SNSVRLV (SEQ ID NO: 18), ENSTKSL (SEQ ID NO: 19), ANSTRTT (SEQ ID NO: 20), PNQTRNN (SEQ ID NO: 21), QNSVKGY (SEQ ID NO: 22), GNHVRLA (SEQ ID NO: 23), VNSTKST (SEQ ID NO: 24), and DNSIRSS (SEQ ID NO: 25).

25. The AAV capsid protein of any of claims 1-24 wherein the AAV is AAV9.

26. The AAV capsid protein of any of claims 1-25 wherein the AAV is provided in SEQ ID NO: 1

27. The AAV capsid protein of any of claims 1-26 wherein the insertion is between amino acid 588 and amino acid 589.

28. The AAV capsid protein of any one of claims 1-27, wherein 60 copies of the AAV capsid protein are assembled into the AAV capsid.

29. The AAV capsid protein of any of claims 1-28, wherein the AAV capsid protein is present in VP1, VP2, and VP3 of the AAV capsid.

30. The AAV capsid protein of any of claims 1-29, wherein the AAV capsid protein is characterized by at least one of an increased transduction enrichment when measured in a CNS in a subject when delivered to the subject systemically.

31. The AAV capsid protein any of claims 1-30, wherein the AAV capsid protein further comprises an amino acid substitution comprising A589N or Q590P.

32. An AAV capsid comprising an AAV capsid protein of any of claims 1-31.

33. The AAV capsid of claim 32, wherein the AAV capsid is chimeric.

34. The AAV capsid of any of claims 32-33 that is isolated and purified.

35. The AAV capsid of any of claims 32-34 formulated as a pharmaceutical formulation for systemic administration to treat a disease or a condition of the CNS, the pharmaceutical formulation further comprising a pharmaceutically acceptable carrier.

36. The AAV capsid protein of any of claims 1-31, wherein the capsid protein is expressed in the CNS.

37. The AAV capsid protein of claim 36, wherein the CNS comprises a cell-type selected from a neuron, an oligodendrocyte, an astrocyte, and a brain vascular cell.

38. The AAV capsid protein of any one of claims 36-37, wherein the CNS comprises a tissue that is selected from brain, thalamus, cortex, putamen, lateral ventricles, medulla, the pons, the amygdala, the motor cortex, caudate, hypothalamus, striatum, ventral midbrain, neocortex, basal ganglia, hippocampus, thalamus, cerebrum, cerebellum, brain stem, and spinal cord.

39. A nucleic acid sequence encoding the peptide of any of claims 1-31, selected from the group consisting of SEQID NOs 57-73.

40. A nucleic acid sequence encoding a peptide sequence as provided in Table 1 or FIG. 1.

41. A recombinant vector comprising a nucleic acid encoding the AAV capsid protein of any one of claims 1-31.

42. A kit comprising:
a) a first vector comprising the recombinant vector of claim 41;
b) a second vector encoding a helper virus protein; and
c) a third vector comprising a therapeutic nucleic acid encoding a therapeutic gene expression product.

43. A method of treating a disease or condition in a subject comprising administering a therapeutically effective amount of a pharmaceutical formulation comprising the AAV capsid protein of any one of claims 1-31.

44. The method of claim 43, wherein the disease or the condition is a disease or a condition of a CNS of the subject.

45. A method of manufacturing a recombinant AAV particle from the AAV capsid of any one of claims 1-31, the method comprising:
a. introducing into a cell a nucleic acid comprising:
i.a first nucleic acid sequence encoding a therapeutic gene expression product;
ii.a second nucleic acid sequence encoding a recombinant viral genome comprising a capsid (Cap) gene modified to express the AAV capsid of any one of claims 1-31; and
iii.a third nucleic acid sequence encoding an AAV helper virus genome; and
b. assembling the recombinant AAV particle, the recombinant AAV particle comprising the AAV capsid encapsidating the first nucleic acid.

46. The AAV capsid protein of any of claims 1-31 wherein the AAV capsid protein is characterized by an increased transduction enrichment when measured in a tissue in a subject when delivered to the subject systemically.

47. The AAV capsid protein of any of claims 1-31 wherein the tissue is brain tissue.

48. An AAV particle comprising an AAV capsid protein of any of claims 1-31 and a viral genome.

49. A peptide comprising an amino acid sequence selected from GNTTRVT (SEQ ID NO: 9), LNSVRNT (SEQ ID NO: 10), NNNTKPS (SEQ ID NO: 11), GNSIKVV (SEQ ID NO: 12), GNSVRIS (SEQ ID NO: 13), ENHVRSS (SEQ ID NO: 14), SNTTRQT (SEQ ID NO: 15), TNSVKAT (SEQ ID NO: 16), GNTTRLV (SEQ ID NO: 17), SNSVRLV (SEQ ID NO: 18), ENSTKSL (SEQ ID NO: 19), ANSTRTT (SEQ ID NO: 20), PNQTRNN (SEQ ID NO: 21), QNSVKGY (SEQ ID NO: 22), GNHVRLA (SEQ ID NO: 23), VNSTKST (SEQ ID NO: 24), and DNSIRSS (SEQ ID NO: 25).

50. A recombinant adeno-associated virus (rAAV) comprising a capsid comprising any one of GNTTRVT (SEQ ID NO: 9), LNSVRNT (SEQ ID NO: 10), NNNTKPS (SEQ ID NO: 11), GNSIKVV (SEQ ID NO: 12), GNSVRIS (SEQ ID NO: 13), ENHVRSS (SEQ ID NO: 14), SNTTRQT (SEQ ID NO: 15), TNSVKAT (SEQ ID NO: 16), GNTTRLV (SEQ ID NO: 17), SNSVRLV (SEQ ID NO: 18), ENSTKSL (SEQ ID NO: 19), ANSTRTT (SEQ ID NO: 20), PNQTRNN (SEQ ID NO: 21), QNSVKGY (SEQ ID NO: 22), GNHVRLA (SEQ ID NO: 23), VNSTKST (SEQ ID NO: 24), and DNSIRSS (SEQ ID NO: 25).

The application's sequence listing, which the Patent Office published only in electronic form, follows.

SEQUENCE LISTING (9244 sequences)

SEQ ID NO: 1 - protein, 736 aa, adeno-associated virus 9
MAADGYLPDWLEDNLSEGIREWWALKPGAPQPKANQQHQDNARGLVLPGYKYLGPGNGLDKGEPVNAADAAALEHDKAYDQQLKAGDNPYLKYNHADAEFQERLKEDTSFGGNLGRAVFQAKKRLLEPLGLVEEAAKTAPGKKRPVEQSPQEPDSSAGIGKSGAQPAKKRLNFGQTGDTESVPDPQPIGEPPAAPSGVGSLTMASGGGAPVADNNEGADGVGSSSGNWHCDSQWLGDRVITTSTRTWALPTYNNHLYKQISNSTSGGSSNDNAYFGYSTPWGYFDFNRFHCHFSPRDWQRLINNNWGFRPKRLNFKLFNIQVKEVTDNNGVKTIANNLTSTVQVFTDSDYQLPYVLGSAHEGCLPPFPADVFMIPQYGYLTLNDGSQAVGRSSFYCLEYFPSQMLRTGNNFQFSYEFENVPFHSSYAHSQSLDRLMNPLIDQYLYYLSKTINGSGQNQQTLKFSVAGPSNMAVQGRNYIPGPSYRQQRVSTTVTQNNNSEFAWPGASSWALNGRNSLMNPGPAMASHKEGEDRFFPLSGSLIFGKQGTGRDNVDADKVMITNEEEIKTTNPVATESYGQVATNHQSAQAQAQTGWVQNQGILPGMVWQDRDVYLQGPIWAKIPHTDGNFHPSPLMGGFGMKHPPPQILIKNTPVPADPPTAFNKDKLNSFITQYSTGQVSVEIEWELQKENSKRWNPEIQYTSNYYKSNNVEFAVNTEGVYSEPRPIGTRYLTRNL

SEQ ID NO: 2 - protein, 7 aa, Artificial Sequence
  Synthesized
  MISC_FEATURE (1)..(1): A, S, G, N, L, Y, H, D, E, Q, P, T, or V
  MISC_FEATURE (3)..(3): Q, S, V, T, N, H or A
  MISC_FEATURE (4)..(4): I, V, or T
  MISC_FEATURE (5)..(5): K or R
  MISC_FEATURE (6)..(6): N, V, P, I, T, S, Q, A, L or G
  MISC_FEATURE (7)..(7): I, S, T, L, V, M, Y, F, A or N
XNXXXXX

SEQ ID NO: 3 - protein, 7 aa, Artificial Sequence
  Synthesized
  MISC_FEATURE (1)..(1): A, S, G, N, L, Y, H, D, E, Q, P, T or V
  MISC_FEATURE (6)..(6): N, V, P, I, T, S, Q, A, L or G
  MISC_FEATURE (7)..(7): I, S, T, L, V, M, Y, F, A or N
XNHVRXX

SEQ ID NO: 4 - protein, 7 aa, Artificial Sequence
  Synthesized
  MISC_FEATURE (1)..(1): A, S, G, N, L, Y, H, D, E, Q, P, T or V
  MISC_FEATURE (4)..(4): V or T
  MISC_FEATURE (5)..(5): K or R
  MISC_FEATURE (6)..(6): N, V, P, I, T, S, Q, A, L or G
  MISC_FEATURE (7)..(7): I, S, T, L, V, M, Y, F, A or N
XNVXXXX

SEQ ID NO: 5 - protein, 7 aa, Artificial Sequence
  Synthesized
  MISC_FEATURE (1)..(1): A, S, G, N, L, Y, H, D, E, Q, P, T or V
  MISC_FEATURE (4)..(4): I, V or T
  MISC_FEATURE (5)..(5): K or R
  MISC_FEATURE (6)..(6): N, V, P, I, T, S, Q, A, L or G
  MISC_FEATURE (7)..(7): I, S, T, L, V, M, Y, F, A or N
XNTXXXX

SEQ ID NO: 6 - protein, 7 aa, Artificial Sequence
  Synthesized
  MISC_FEATURE (1)..(1): A, S, G, N, L, Y, H, D, E, Q, P, T or V
  MISC_FEATURE (3)..(3): Q, S, V, T, N, H or A
  MISC_FEATURE (6)..(6): N, V, P, I, T, S, Q, A or L
  MISC_FEATURE (7)..(7): N, V, P, I, T, S, Q, A or L
XNXVRXX

SEQ ID NO: 7 - protein, 7 aa, Artificial Sequence
  Synthesized
  MISC_FEATURE (1)..(1): A, S, L, N, H, D, E, P, T or V
  MISC_FEATURE (3)..(3): Q, S, V, T or N
  MISC_FEATURE (6)..(6): N, V, P, T, S, Q or G
  MISC_FEATURE (7)..(7): I, S, T, L, V, M, Y, F, A or N
XNXTKXX

SEQ ID NO: 8 - protein, 7 aa, Artificial Sequence
  Synthesized
  MISC_FEATURE (1)..(1): A, S, G, N, L, H, P, T or V
  MISC_FEATURE (3)..(3): Q, S, V, T or H
  MISC_FEATURE (6)..(6): N, V, T, S, Q, L or G
  MISC_FEATURE (7)..(7): I, S, T, V, M, Y, F, A or N
XNXTRXX

SEQ ID NO: 9 - protein, 7 aa, Artificial Sequence
  Synthesized
GNTTRVT

SEQ ID NO: 10 - protein, 7 aa, Artificial Sequence
  Synthesized
LNSVRNT

SEQ ID NO: 11 - protein, 7 aa, Artificial Sequence
  Synthesized
NNNTKPS

SEQ ID NO: 12 - protein, 7 aa, Artificial Sequence
  Synthesized
GNSIKVV

SEQ ID NO: 13 - protein, 7 aa, Artificial Sequence
  Synthesized
GNSVRIS

SEQ ID NO: 14 - protein, 7 aa, Artificial Sequence
  Synthesized
ENHVRSS

SEQ ID NO: 15 - protein, 7 aa, Artificial Sequence
  Synthesized
SNTTRQT

SEQ ID NO: 16 - protein, 7 aa, Artificial Sequence
  Synthesized
TNSVKAT

SEQ ID NO: 17 - protein, 7 aa, Artificial Sequence
  Synthesized
GNTTRLV

SEQ ID NO: 18 - protein, 7 aa, Artificial Sequence
  Synthesized
SNSVRLV

SEQ ID NO: 19 - protein, 7 aa, Artificial Sequence
  Synthesized
ENSTKSL

SEQ ID NO: 20 - protein, 7 aa, Artificial Sequence
  Synthesized
ANSTRTT

SEQ ID NO: 21 - protein, 7 aa, Artificial Sequence
  Synthesized
PNQTRNN

SEQ ID NO: 22 - protein, 7 aa, Artificial Sequence
  Synthesized
QNSVKGY

SEQ ID NO: 23 - protein, 7 aa, Artificial Sequence
  Synthesized
GNHVRLA

SEQ ID NO: 24 - protein, 7 aa, Artificial Sequence
  Synthesized
VNSTKST

SEQ ID NO: 25 - protein, 7 aa, Artificial Sequence
  Synthesized
DNSIRSS

SEQ ID NO: 26 - protein, 11 aa, Artificial Sequence
  Synthesized
AQGNTTRVTAQ

SEQ ID NO: 27 - protein, 11 aa, Artificial Sequence
  Synthesized
AQLNSVRNTAQ

SEQ ID NO: 28 - protein, 11 aa, Artificial Sequence
  Synthesized
AQNNNTKPSAQ

SEQ ID NO: 29 - protein, 11 aa, Artificial Sequence
  Synthesized
AQGNSIKVVAQ

SEQ ID NO: 30 - protein, 11 aa, Artificial Sequence
  Synthesized
AQGNSVRISAQ

SEQ ID NO: 31 - protein, 11 aa, Artificial Sequence
  Synthesized
AQENHVRSSAQ

SEQ ID NO: 32 - protein, 11 aa, Artificial Sequence
  Synthesized
AQSNTTRQTAQ

SEQ ID NO: 33 - protein, 11 aa, Artificial Sequence
  Synthesized
AQTNSVKATAQ

SEQ ID NO: 34 - protein, 11 aa, Artificial Sequence
  Synthesized
AQGNTTRLVAQ

SEQ ID NO: 35 - protein, 11 aa, Artificial Sequence
  Synthesized
AQSNSVRLVAQ

SEQ ID NO: 36 - protein, 11 aa, Artificial Sequence
  Synthesized
AQENSTKSLAQ

SEQ ID NO: 37 - protein, 11 aa, Artificial Sequence
  Synthesized
AQANSTRTTAQ

SEQ ID NO: 38 - protein, 11 aa, Artificial Sequence
  Synthesized
AQPNQTRNNAQ

SEQ ID NO: 39 - protein, 11 aa, Artificial Sequence
  Synthesized
AQQNSVKGYAQ

SEQ ID NO: 40 - protein, 11 aa, Artificial Sequence
  Synthesized
AQGNHVRLAAQ

SEQ ID NO: 41 - protein, 11 aa, Artificial Sequence
  Synthesized
AQVNSTKSTAQ

SEQ ID NO: 42 - protein, 11 aa, Artificial Sequence
  Synthesized
AQDNSIRSSAQ

SEQ ID NO: 43 - protein, 743 aa, Artificial Sequence
  Synthesized
MAADGYLPDWLEDNLSEGIREWWALKPGAPQPKANQQHQDNARGLVLPGYKYLGPGNGLDKGEPVNAADAAALEHDKAYDQQLKAGDNPYLKYNHADAEFQERLKEDTSFGGNLGRAVFQAKKRLLEPLGLVEEAAKTAPGKKRPVEQSPQEPDSSAGIGKSGAQPAKKRLNFGQTGDTESVPDPQPIGEPPAAPSGVGSLTMASGGGAPVADNNEGADGVGSSSGNWHCDSQWLGDRVITTSTRTWALPTYNNHLYKQISNSTSGGSSNDNAYFGYSTPWGYFDFNRFHCHFSPRDWQRLINNNWGFRPKRLNFKLFNIQVKEVTDNNGVKTIANNLTSTVQVFTDSDYQLPYVLGSAHEGCLPPFPADVFMIPQYGYLTLNDGSQAVGRSSFYCLEYFPSQMLRTGNNFQFSYEFENVPFHSSYAHSQSLDRLMNPLIDQYLYYLSRTINGSGQNQQTLKFSVAGPSNMAVQGRNYIPGPSYRQQRVSTTVTQNNNSEFAWPGASSWALNGRNSLMNPGPAMASHKEGEDRFFPLSGSLIFGKQGTGRDNVDADKVMITNEEEIKTTNPVATESYGQVATNHQSDGTLAVPFKAQAQTGWVQNQGILPGMVWQDRDVYLQGPIWAKIPHTDGNFHPSPLMGGFGMKHPPPQILIKNTPVPADPPTAFNKDKLNSFITQYSTGQVSVEIEWELQKENSKRWNPEIQYTSNYYKSNNVEFAVNTEGVYSEPRPIGTRYLTRNL

SEQ ID NO: 44 - protein, 736 aa, Artificial Sequence
  Synthesized
MAADGYLPDWLEDNLSEGIREWWALKPGAPQPKANQQHQDNARGLVLPGYKYLGPGNGLDKGEPVNAADAAALEHDKAYDQQLKAGDNPYLKYNHADAEFQERLKEDTSFGGNLGRAVFQAKKRLLEPLGLVEEAAKTAPGKKRPVEQSPQEPDSSAGIGKSGAQPAKKRLNFGQTGDTESVPDPQPIGEPPAAPSGVGSLTMASGGGAPVADNNEGADGVGSSSGNWHCDSQWLGDRVITTSTRTWALPTYNNHLYKQISNSTSGGSSNDNAYFGYSTPWGYFDFNRFHCHFSPRDWQRLINNNWGFRPKRLNFKLFNIQVKEVTDNNGVKTIANNLTSTVQVFTDSDYQLPYVLGSAHEGCLPPFPADVFMIPQYGYLTLNDGSQAVGRSSFYCLEYFPSQMLRTGNNFQFSYEFENVPFHSSYAHSQSLDRLMNPLIDQYLYYLSRTIKDNTPGRQTLKFSVAGPSNMAVQGRNYIPGPSYRQQRVSTTVTQNNNSEFAWPGASSWALNGRNSLMNPGPAMASHKEGEDRFFPLSGSLIFGKQGTGRDNVDADKVMITNEEEIKTTNPVATESYGQVATNHQSAQAQAQTGWVQNQGILPGMVWQDRDVYLQGPIWAKIPHTDGNFHPSPLMGGFGMKHPPPQILIKNTPVPADPPTAFNKDKLNSFITQYSTGQVSVEIEWELQKENSKRWNPEIQYTSNYYKSNNVEFAVNTEGVYSEPRPIGTRYLTRNL

SEQ ID NO: 45 - protein, 743 aa, Artificial Sequence
  Synthesized
MAADGYLPDWLEDNLSEGIREWWALKPGAPQPKANQQHQDNARGLVLPGYKYLGPGNGLDKGEPVNAADAAALEHDKAYDQQLKAGDNPYLKYNHADAEFQERLKEDTSFGGNLGRAVFQAKKRLLEPLGLVEEAAKTAPGKKRPVEQSPQEPDSSAGIGKSGAQPAKKRLNFGQTGDTESVPDPQPIGEPPAAPSGVGSLTMASGGGAPVADNNEGADGVGSSSGNWHCDSQWLGDRVITTSTRTWALPTYNNHLYKQISNSTSGGSSNDNAYFGYSTPWGYFDFNRFHCHFSPRDWQRLINNNWGFRPKRLNFKLFNIQVKEVTDNNGVKTIANNLTSTVQVFTDSDYQLPYVLGSAHEGCLPPFPADVFMIPQYGYLTLNDGSQAVGRSSFYCLEYFPSQMLRTGNNFQFSYEFENVPFHSSYAHSQSLDRLMNPLIDQYLYYLSRTIQQGKQSVQTLKFSVAGPSNMAVQGRNYIPGPSYRQQRVSTTVTQNNNSEFAWPGASSWALNGRNSLMNPGPAMASHKEGEDRFFPLSGSLIFGKQGTGRDNVDADKVMITNEEEIKTTNPVATESYGQVATNHQSDGTLAVPFKAQAQTGWVQNQGILPGMVWQDRDVYLQGPIWAKIPHTDGNFHPSPLMGGFGMKHPPPQILIKNTPVPADPPTAFNKDKLNSFITQYSTGQVSVEIEWELQKENSKRWNPEIQYTSNYYKSNNVEFAVNTEGVYSEPRPIGTRYLTRNL

SEQ ID NO: 46 - protein, 742 aa, Artificial Sequence
  Synthesized
MAADGYLPDWLEDNLSEGIREWWALKPGAPQPKANQQHQDNARGLVLPGYKYLGPGNGLDKGEPVNAADAAALEHDKAYDQQLKAGDNPYLKYNHADAEFQERLKEDTSFGGNLGRAVFQAKKRLLEPLGLVEEAAKTAPGKKRPVEQSPQEPDSSAGIGKSGAQPAKKRLNFGQTGDTESVPDPQPIGEPPAAPSGVGSLTMASGGGAPVADNNEGADGVGSSSGNWHCDSQWLGDRVITTSTRTWALPTYNNHLYKQISNSTSGGSSNDNAYFGYSTPWGYFDFNRFHCHFSPRDWQRLINNNWGFRPKRLNFKLFNIQVKEVTDNNGVKTIANNLTSTVQVFTDSDYQLPYVLGSAHEGCLPPFPADVFMIPQYGYLTLNDGSQAVGRSSFYCLEYFPSQMLRTGNNFQFYEFENVPFHSSYAHSQSLDRLMNPLIDQYLYYLSRTIDGAATKNQTLKFSVAGPSNMAVQGRNYIPGPSYRQQRVSTTVTQNNNSEFAWPGASSWALNGRNSLMNPGPAMASHKEGEDRFFPLSGSLIFGKQGTGRDNVDADKVMITNEEEIKTTNPVATESYGQVATNHQSDGTLAVPFKAQAQTGWVQNQGILPGMVWQDRDVYLQGPIWAKIPHTDGNFHPSPLMGGFGMKHPPPQILIKNTPVPADPPTAFNKDKLNSFITQYSTGQVSVEIEWELQKENSKRWNPEIQYTSNYYKSNNVEFAVNTEGVYSEPRPIGTRYLTRNL

SEQ ID NO: 47 - protein, 743 aa, Artificial Sequence
  Synthesized
MAADGYLPDWLEDNLSEGIREWWALKPGAPQPKANQQHQDNARGLVLPGYKYLGPGNGLDKGEPVNAADAAALEHDKAYDQQLKAGDNPYLKYNHADAEFQERLKEDTSFGGNLGRAVFQAKKRLLEPLGLVEEAAKTAPGKKRPVEQSPQEPDSSAGIGKSGAQPAKKRLNFGQTGDTESVPDPQPIGEPPAAPSGVGSLTMASGGGAPVADNNEGADGVGSSSGNWHCDSQWLGDRVITTSTRTWALPTYNNHLYKQISNSTSGGSSNDNAYFGYSTPWGYFDFNRFHCHFSPRDWQRLINNNWGFRPKRLNFKLFNIQVKEVTDNNGVKTIANNLTSTVQVFTDSDYQLPYVLGSAHEGCLPPFPADVFMIPQYGYLTLNDGSQAVGRSSFYCLEYFPSQMLRTGNNFQFSYEFENVPFHSSYAHSQSLDRLMNPLIDQYLYYLSRTIDGQSSKSQTLKFSVAGPSNMAVQGRNYIPGPSYRQQRVSTTVTQNNNSEFAWPGASSWALNGRNSLMNPGPAMASHKEGEDRFFPLSGSLIFGKQGTGRDNVDADKVMITNEEEIKTTNPVATESYGQVATNHQSDGTLAVPFKAQAQTGWVQNQGILPGMVWQDRDVYLQGPIWAKIPHTDGNFHPSPLMGGFGMKHPPPQILIKNTPVPADPPTAFNKDKLNSFITQYSTGQVSVEIEWELQKENSKRWNPEIQYTSNYYKSNNVEFAVNTEGVYSEPRPIGTRYLTRNL

SEQ ID NO: 48 - protein, 743 aa, Artificial Sequence
  Synthesized
MAADGYLPDWLEDNLSEGIREWWALKPGAPQPKANQQHQDNARGLVLPGYKYLGPGNGLDKGEPVNAADAAALEHDKAYDQQLKAGDNPYLKYNHADAEFQERLKEDTSFGGNLGRAVFQAKKRLLEPLGLVEEAAKTAPGKKRPVEQSPQEPDSSAGIGKSGAQPAKKRLNFGQTGDTESVPDPQPIGEPPAAPSGVGSLTMASGGGAPVADNNEGADGVGSSSGNWHCDSQWLGDRVITTSTRTWALPTYNNHLYKQISNSTSGGSSNDNAYFGYSTPWGYFDFNRFHCHFSPRDWQRLINNNWGFRPKRLNFKLFNIQVKEVTDNNGVKTIANNLTSTVQVFTDSDYQLPYVLGSAHEGCLPPFPADVFMIPQYGYLTLNDGSQAVGRSSFYCLEYFPSQMLRTGNNFQFSYEFENVPFHSSYAHSQSLDRLMNPLIDQYLYYLSRTINGSGQNQQTLKFSVAGPSNMAVQGRNYIPGPSYRQQRVSTTVTQNNNSEFAWPGASSWALNGRNSLMNPGPAMASHKEGEDRFFPLSGSLIFGKQGTGRDNVDADKVMITNEEEIKTTNPVATESYGQVATNHQSAQGNTTRVTAQAQTGWVQNQGILPGMVWQDRDVYLQGPIWAKIPHTDGNFHPSPLMGGFGMKHPPPQILIKNTPVPADPPTAFNKDKLNSFITQYSTGQVSVEIEWELQKENSKRWNPEIQYTSNYYKSNNVEFAVNTEGVYSEPRPIGTRYLTRNL

SEQ ID NO: 49 - protein, 11 aa, Artificial Sequence
  Synthesized
AQAAFSSERAQ

SEQ ID NO: 50 - protein, 11 aa, Artificial Sequence
  Synthesized
AQAAHSSAMAQ

SEQ ID NO: 51 - protein, 743 aa, Artificial Sequence
  Synthesized
MAADGYLPDWLEDNLSEGIREWWALKPGAPQPKANQQHQDNARGLVLPGYKYLGPGNGLDKGEPVNAADAAALEHDKAYDQQLKAGDNPYLKYNHADAEFQERLKEDTSFGGNLGRAVFQAKKRLLEPLGLVEEAAKTAPGKKRPVEQSPQEPDSSAGIGKSGAQPAKKRLNFGQTGDTESVPDPQPIGEPPAAPSGVGSLTMASGGGAPVADNNEGADGVGSSSGNWHCDSQWLGDRVITTSTRTWALPTYNNHLYKQISNSTSGGSSNDNAYFGYSTPWGYFDFNRFHCHFSPRDWQRLINNNWGFRPKRLNFKLFNIQVKEVTDNNGVKTIANNLTSTVQVFTDSDYQLPYVLGSAHEGCLPPFPADVFMIPQYGYLTLNDGSQAVGRSSFYCLEYFPSQMLRTGNNFQFSYEFENVPFHSSYAHSQSLDRLMNPLIDQYLYYLSRTINGSGQNQQTLKFSVAGPSNMAVQGRNYIPGPSYRQQRVSTTVTQNNNSEFAWPGASSWALNGRNSLMNPGPAMASHKEGEDRFFPLSGSLIFGKQGTGRDNVDADKVMITNEEEIKTTNPVATESYGQVATNHQSAQLNSVRNTAQAQTGWVQNQGILPGMVWQDRDVYLQGPIWAKIPHTDGNFHPSPLMGGFGMKHPPPQILIKNTPVPADPPTAFNKDKLNSFITQYSTGQVSVEIEWELQKENSKRWNPEIQYTSNYYKSNNVEFAVNTEGVYSEPRPIGTRYLTRNL

SEQ ID NO: 52 - protein, 743 aa, Artificial Sequence
  Synthesized
MAADGYLPDWLEDNLSEGIREWWALKPGAPQPKANQQHQDNARGLVLPGYKYLGPGNGLDKGEPVNAADAAALEHDKAYDQQLKAGDNPYLKYNHADAEFQERLKEDTSFGGNLGRAVFQAKKRLLEPLGLVEEAAKTAPGKKRPVEQSPQEPDSSAGIGKSGAQPAKKRLNFGQTGDTESVPDPQPIGEPPAAPSGVGSLTMASGGGAPVADNNEGADGVGSSSGNWHCDSQWLGDRVITTSTRTWALPTYNNHLYKQISNSTSGGSSNDNAYFGYSTPWGYFDFNRFHCHFSPRDWQRLINNNWGFRPKRLNFKLFNIQVKEVTDNNGVKTIANNLTSTVQVFTDSDYQLPYVLGSAHEGCLPPFPADVFMIPQYGYLTLNDGSQAVGRSSFYCLEYFPSQMLRTGNNFQFSYEFENVPFHSSYAHSQSLDRLMNPLIDQYLYYLSRTINGSGQNQQTLKFSVAGPSNMAVQGRNYIPGPSYRQQRVSTTVTQNNNSEFAWPGASSWALNGRNSLMNPGPAMASHKEGEDRFFPLSGSLIFGKQGTGRDNVDADKVMITNEEEIKTTNPVATESYGQVATNHQSAQGNSIKVVAQAQTGWVQNQGILPGMVWQDRDVYLQGPIWAKIPHTDGNFHPSPLMGGFGMKHPPPQILIKNTPVPADPPTAFNKDKLNSFITQYSTGQVSVEIEWELQKENSKRWNPEIQYTSNYYKSNNVEFAVNTEGVYSEPRPIGTRYLTRNL

SEQ ID NO: 53 - protein, 743 aa, Artificial Sequence
  Synthesized
MAADGYLPDWLEDNLSEGIREWWALKPGAPQPKANQQHQDNARGLVLPGYKYLGPGNGLDKGEPVNAADAAALEHDKAYDQQLKAGDNPYLKYNHADAEFQERLKEDTSFGGNLGRAVFQAKKRLLEPLGLVEEAAKTAPGKKRPVEQSPQEPDSSAGIGKSGAQPAKKRLNFGQTGDTESVPDPQPIGEPPAAPSGVGSLTMASGGGAPVADNNEGADGVGSSSGNWHCDSQWLGDRVITTSTRTWALPTYNNHLYKQISNSTSGGSSNDNAYFGYSTPWGYFDFNRFHCHFSPRDWQRLINNNWGFRPKRLNFKLFNIQVKEVTDNNGVKTIANNLTSTVQVFTDSDYQLPYVLGSAHEGCLPPFPADVFMIPQYGYLTLNDGSQAVGRSSFYCLEYFPSQMLRTGNNFQFSYEFENVPFHSSYAHSQSLDRLMNPLIDQYLYYLSRTINGSGQNQQTLKFSVAGPSNMAVQGRNYIPGPSYRQQRVSTTVTQNNNSEFAWPGASSWALNGRNSLMNPGPAMASHKEGEDRFFPLSGSLIFGKQGTGRDNVDADKVMITNEEEIKTTNPVATESYGQVATNHQSAQGNSVRISAQAQTGWVQNQGILPGMVWQDRDVYLQGPIWAKIPHTDGNFHPSPLMGGFGMKHPPPQILIKNTPVPADPPTAFNKDKLNSFITQYSTGQVSVEIEWELQKENSKRWNPEIQYTSNYYKSNNVEFAVNTEGVYSEPRPIGTRYLTRNL

SEQ ID NO: 54 - protein, 743 aa, Artificial Sequence
  Synthesized
MAADGYLPDWLEDNLSEGIREWWALKPGAPQPKANQQHQDNARGLVLPGYKYLGPGNGLDKGEPVNAADAAALEHDKAYDQQLKAGDNPYLKYNHADAEFQERLKEDTSFGGNLGRAVFQAKKRLLEPLGLVEEAAKTAPGKKRPVEQSPQEPDSSAGIGKSGAQPAKKRLNFGQTGDTESVPDPQPIGEPPAAPSGVGSLTMASGGGAPVADNNEGADGVGSSSGNWHCDSQWLGDRVITTSTRTWALPTYNNHLYKQISNSTSGGSSNDNAYFGYSTPWGYFDFNRFHCHFSPRDWQRLINNNWGFRPKRLNFKLFNIQVKEVTDNNGVKTIANNLTSTVQVFTDSDYQLPYVLGSAHEGCLPPFPADVFMIPQYGYLTLNDGSQAVGRSSFYCLEYFPSQMLRTGNNFQFSYEFENVPFHSSYAHSQSLDRLMNPLIDQYLYYLSRTINGSGQNQQTLKFSVAGPSNMAVQGRNYIPGPSYRQQRVSTTVTQNNNSEFAWPGASSWALNGRNSLMNPGPAMASHKEGEDRFFPLSGSLIFGKQGTGRDNVDADKVMITNEEEIKTTNPVATESYGQVATNHQSAQENHVRSSAQAQTGWVQNQGILPGMVWQDRDVYLQGPIWAKIPHTDGNFHPSPLMGGFGMKHPPPQILIKNTPVPADPPTAFNKDKLNSFITQYSTGQVSVEIEWELQKENSKRWNPEIQYTSNYYKSNNVEFAVNTEGVYSEPRPIGTRYLTRNL

SEQ ID NO: 55 - protein, 743 aa, Artificial Sequence
  Synthesized
MAADGYLPDWLEDNLSEGIREWWALKPGAPQPKANQQHQDNARGLVLPGYKYLGPGNGLDKGEPVNAADAAALEHDKAYDQQLKAGDNPYLKYNHADAEFQERLKEDTSFGGNLGRAVFQAKKRLLEPLGLVEEAAKTAPGKKRPVEQSPQEPDSSAGIGKSGAQPAKKRLNFGQTGDTESVPDPQPIGEPPAAPSGVGSLTMASGGGAPVADNNEGADGVGSSSGNWHCDSQWLGDRVITTSTRTWALPTYNNHLYKQISNSTSGGSSNDNAYFGYSTPWGYFDFNRFHCHFSPRDWQRLINNNWGFRPKRLNFKLFNIQVKEVTDNNGVKTIANNLTSTVQVFTDSDYQLPYVLGSAHEGCLPPFPADVFMIPQYGYLTLNDGSQAVGRSSFYCLEYFPSQMLRTGNNFQFSYEFENVPFHSSYAHSQSLDRLMNPLIDQYLYYLSRTINGSGQNQQTLKFSVAGPSNMAVQGRNYIPGPSYRQQRVSTTVTQNNNSEFAWPGASSWALNGRNSLMNPGPAMASHKEGEDRFFPLSGSLIFGKQGTGRDNVDADKVMITNEEEIKTTNPVATESYGQVATNHQSAQSNTTRQTAQAQTGWVQNQGILPGMVWQDRDVYLQGPIWAKIPHTDGNFHPSPLMGGFGMKHPPPQILIKNTPVPADPPTAFNKDKLNSFITQYSTGQVSVEIEWELQKENSKRWNPEIQYTSNYYKSNNVEFAVNTEGVYSEPRPIGTRYLTRNL

SEQ ID NO: 56 - DNA, 2211 bp, adeno-associated virus 9
atggctgccgatggttatcttccagattggctcgaggacaaccttagtgaaggaattcgcgagtggtgggctttgaaacctggagcccctcaacccaaggcaaatcaacaacatcaagacaacgctcgaggtcttgtgcttccgggttacaaataccttggacccggcaacggactcgacaagggggagccggtcaacgcagcagacgcggcggccctcgagcacgacaaggcctacgaccagcagctcaaggccggagacaacccgtacctcaagtacaaccacgccgacgccgagttccaggagcggctcaaagaagatacgtcttttgggggcaacctcgggcgagcagtcttccaggccaaaaagaggcttcttgaacctcttggtctggttgaggaagcggctaagacggctcctggaaagaagaggcctgtagagcagtctcctcaggaaccggactcctccgcgggtattggcaaatcgggtgcacagcccgctaaaaagagactcaatttcggtcagactggcgacacagagtcagtcccagaccctcaaccaatcggagaacctcccgcagccccctcaggtgtgggatctcttacaatggcttcaggtggtggcgcaccagtggcagacaataacgaaggtgccgatggagtgggtagttcctcgggaaattggcattgcgattcccaatggctgggggacagagtcatcaccaccagcacccgaacctgggccctgcccacctacaacaatcacctctacaagcaaatctccaacagcacatctggaggatcttcaaatgacaacgcctacttcggctacagcaccccctgggggtattttgacttcaacagattccactgccacttctcaccacgtgactggcagcgactcatcaacaacaactggggattccggcctaagcgactcaacttcaagctcttcaacattcaggtcaaagaggttacggacaacaatggagtcaagaccatcgccaataaccttaccagcacggtccaggtcttcacggactcagactatcagctcccgtacgtgctcgggtcggctcacgagggctgcctcccgccgttcccagcggacgttttcatgattcctcagtacgggtatctgacgcttaatgatggaagccaggccgtgggtcgttcgtccttttactgcctggaatatttcccgtcgcaaatgctaagaacgggtaacaacttccagttcagctacgagtttgagaacgtacctttccatagcagctacgctcacagccaaagcctggaccgactaatgaatccactcatcgaccaatacttgtactatctctcaaagactattaacggttctggacagaatcaacaaacgctaaaattcagtgtggccggacccagcaacatggctgtccagggaagaaactacatacctggacccagctaccgacaacaacgtgtctcaaccactgtgactcaaaacaacaacagcgaatttgcttggcctggagcttcttcttgggctctcaatggacgtaatagcttgatgaatcctggacctgctatggccagccacaaagaaggagaggaccgtttctttcctttgtctggatctttaatttttggcaaacaaggaactggaagagacaacgtggatgcggacaaagtcatgataaccaacgaagaagaaattaaaactactaacccggtagcaacggagtcctatggacaagtggccacaaaccaccagagtgcccaagcacaggcgcagaccggctgggttcaaaaccaaggaatacttccgggtatggtttggcaggacagagatgtgtacctgcaaggacccatttgggccaaaattcctcacacggacggcaactttcacccttctccgctgatgggagggtttggaatgaagcacccgcctcctcagatcctcatcaaaaacacacctgtacctgcggatcctccaacggccttcaacaaggacaagctgaactctttcatcacccagtattctactggccaagtcagcgtggagatcgagtgggagctgcagaaggaaaacagcaagcgctggaacccggagatccagtacacttccaactattacaagtctaataatgttgaatttgctgttaatactgaaggtgtatatagtgaaccccgccccattggcaccagatacctgactcgtaatctgtaa

SEQ ID NO: 57 - DNA, 33 bp, Artificial Sequence
  Synthesized
gctcagggtaatactactcgtgttactgctcag

SEQ ID NO: 58 - DNA, 33 bp, Artificial Sequence
  Synthesized
gctcagttgaattctgttcgtaatactgctcag

SEQ ID NO: 59 - DNA, 33 bp, Artificial Sequence
  Synthesized
gctcagaataataatactaagccttctgctcag

SEQ ID NO: 60 - DNA, 33 bp, Artificial Sequence
  Synthesized
gctcagggtaattctattaaggttgttgctcag

SEQ ID NO: 61 - DNA, 33 bp, Artificial Sequence
  Synthesized
gctcagggtaattctgttcgtatttctgctcag

SEQ ID NO: 62 - DNA, 33 bp, Artificial Sequence
  Synthesized
gctcaggagaatcatgttcgttcttctgctcag

SEQ ID NO: 63 - DNA, 33 bp, Artificial Sequence
  Synthesized
gctcagtctaatactactcgtcagactgctcag

SEQ ID NO: 64 - DNA, 33 bp, Artificial Sequence
  Synthesized
gctcagactaatactcatgtttctaaggctcag

SEQ ID NO: 65 - DNA, 33 bp, Artificial Sequence
  Synthesized
gctcagggtaatactactcgtttggttgctcag

SEQ ID NO: 66 - DNA, 33 bp, Artificial Sequence
  Synthesized
gctcagtctaattctgttcgtttggttgctcag

SEQ ID NO: 67 - DNA, 33 bp, Artificial Sequence
  Synthesized
gctcaggagaattctactaagtctttggctcag

SEQ ID NO: 68 - DNA, 33 bp, Artificial Sequence
  Synthesized
gctcaggctaattctactcgtactactgctcag

SEQ ID NO: 69 - DNA, 33 bp, Artificial Sequence
  Synthesized
gctcagcctaatcagactcgtaataatgctcag

SEQ ID NO: 70 - DNA, 33 bp, Artificial Sequence
  Synthesized
gctcagcagaattctgttaagggttatgctcag

SEQ ID NO: 71 - DNA, 33 bp, Artificial Sequence
  Synthesized
gctcagggtaatcatgttcgtttggctgctcag

SEQ ID NO: 72 - DNA, 33 bp, Artificial Sequence
  Synthesized
gctcaggttaattctactaagtctactgctcag

SEQ ID NO: 73 - DNA, 33 bp, Artificial Sequence
  Synthesized
gctcaggataattctattcgttcttctgctcag

SEQ ID NO: 74 - protein, 7 aa, Artificial Sequence
  Synthesized
KDNTPGR

SEQ ID NO: 75 - protein, 7 aa, Artificial Sequence
  Synthesized
DGAATKN

SEQ ID NO: 76 - protein, 11 aa, Artificial Sequence
  Synthesized
AQAAIRNPTAQ

SEQ ID NO: 77 - protein, 11 aa, Artificial Sequence
  Synthesized
AQAALPRKRAQ

SEQ ID NO: 78 - protein, 11 aa, Artificial Sequence
  Synthesized
AQAAPRAVTAQ

SEQ ID NO: 79 - protein, 11 aa, Artificial Sequence
  Synthesized
AQAAPSRMAAQ

SEQ ID NO: 80 - protein, 11 aa, Artificial Sequence
  Synthesized
AQAASKSVLAQ

SEQ ID NO: 81 - protein, 11 aa, Artificial Sequence
  Synthesized
AQAASKTGLAQ

SEQ ID NO: 82 - protein, 11 aa, Artificial Sequence
  Synthesized
AQAATGSIRAQ

SEQ ID NO: 83 - protein, 11 aa, Artificial Sequence
  Synthesized
AQAATKLNMAQ

SEQ ID NO: 84 - protein, 11 aa, Artificial Sequence
  Synthesized
AQAAYRDQTAQ

SEQ ID NO: 85 - protein, 11 aa, Artificial Sequence
  Synthesized
AQADARSKVAQ

SEQ ID NO: 86 - protein, 11 aa, Artificial Sequence
  Synthesized
AQADASRLPAQ

SEQ ID NO: 87 - protein, 11 aa, Artificial Sequence
  Synthesized
AQADFPSFMAQ

SEQ ID NO: 88 - protein, 11 aa, Artificial Sequence
  Synthesized
AQADGSQLRAQ

SEQ ID NO: 89 - protein, 11 aa, Artificial Sequence
  Synthesized
AQADHYSFMAQ

SEQ ID NO: 90 - protein, 11 aa, Artificial Sequence
  Synthesized
AQADIHTFQAQ

SEQ ID NO: 91 - protein, 11 aa, Artificial Sequence
  Synthesized
AQADRLKLSAQ

SEQ ID NO: 92 - protein, 11 aa, Artificial Sequence
  Synthesized
AQAEGFAMHAQ

SEQ ID NO: 93 - protein, 11 aa, Artificial Sequence
  Synthesized
AQAEGTKLRAQ

SEQ ID NO: 94 - protein, 11 aa, Artificial Sequence
  Synthesized
AQAEKLQHPAQ

SEQ ID NO: 95 - protein, 11 aa, Artificial Sequence
  Synthesized
AQAEMHTKTAQ

SEQ ID NO: 96 - protein, 11 aa, Artificial Sequence
  Synthesized
AQAERMHNQAQ

SEQ ID NO: 97 - protein, 11 aa, Artificial Sequence
  Synthesized
AQAFKLESAAQ

SEQ ID NO: 98 - protein, 11 aa, Artificial Sequence
  Synthesized
AQAFKYSAMAQ

SEQ ID NO: 99 - protein, 11 aa, Artificial Sequence
  Synthesized
AQAFLPRIHAQ

SEQ ID NO: 100 - protein, 11 aa, Artificial Sequence
  Synthesized
AQAGAKTFHAQ

SEQ ID NO: 101 - protein, 11 aa, Artificial Sequence
  Synthesized
AQAGFHSAMAQ

SEQ ID NO: 102 - protein, 11 aa, Artificial Sequence
  Synthesized
AQAGGHSAMAQ

SEQ ID NO: 103 - protein, 11 aa, Artificial Sequence
  Synthesized
AQAGGKLANAQ

SEQ ID NO: 104 - protein, 11 aa, Artificial Sequence
  Synthesized
AQAGGKNVNAQ

SEQ ID NO: 105 - protein, 11 aa, Artificial Sequence
  Synthesized
AQAGGSPTIAQ

SEQ ID NO: 106 - protein, 11 aa, Artificial Sequence
  Synthesized
AQAGHLSAMAQ

SEQ ID NO: 107 - protein, 11 aa, Artificial Sequence
  Synthesized
AQAGHSPSIAQ

SEQ ID NO: 108 - protein, 11 aa, Artificial Sequence
  Synthesized
AQAGIRSMSAQ

SEQ ID NO: 109 - protein, 11 aa, Artificial Sequence
  Synthesized
AQAGKASFMAQ

SEQ ID NO: 110 - protein, 11 aa, Artificial Sequence
  Synthesized
AQAGKFDPLAQ

SEQ ID NO: 111 - protein, 11 aa, Artificial Sequence
  Synthesized
AQAGKFSFMAQ

SEQ ID NO: 112 - protein, 11 aa, Artificial Sequence
  Synthesized
AQAGKLQSLAQ

SEQ ID NO: 113 - protein, 11 aa, Artificial Sequence
  Synthesized
AQAGKSSLVAQ

SEQ ID NO: 114 - protein, 11 aa, Artificial Sequence
  Synthesized
AQAGLKTSPAQ

SEQ ID NO: 115 - protein, 11 aa, Artificial Sequence
  Synthesized
AQAGLPGMFAQ

SEQ ID NO: 116 - protein, 11 aa, Artificial Sequence
  Synthesized
AQAGLPHHHAQ

SEQ ID NO: 117 - protein, 11 aa, Artificial Sequence
  Synthesized
AQAGLPRHTAQ

SEQ ID NO: 118 - protein, 11 aa, Artificial Sequence
  Synthesized
AQAGLPRYHAQ

SEQ ID NO: 119 - protein, 11 aa, Artificial Sequence
  Synthesized
AQAGLQPRGAQ

SEQ ID NO: 120 - protein, 11 aa, Artificial Sequence
  Synthesized
AQAGLRLTVAQ

SEQ ID NO: 121 - protein, 11 aa, Artificial Sequence
  Synthesized
AQAGPIGNRAQ

SEQ ID NO: 122 - protein, 11 aa, Artificial Sequence
  Synthesized
AQAGQLTRTAQ

SEQ ID NO: 123 - protein, 11 aa, Artificial Sequence
  Synthesized
AQAGQPNHRAQ

SEQ ID NO: 124 - protein, 11 aa, Artificial Sequence
  Synthesized
AQAGRTAMSAQ

SEQ ID NO: 125 - protein, 11 aa, Artificial Sequence
  Synthesized
AQAGSFSFMAQ

SEQ ID NO: 126 - protein, 11 aa, Artificial Sequence
  Synthesized
AQAGSIGKSAQ

SEQ ID NO: 127 - protein, 11 aa, Artificial Sequence
  Synthesized
AQAGSVLTSAQ

SEQ ID NO: 128 - protein, 11 aa, Artificial Sequence
  Synthesized
AQAGSVVSMAQ

SEQ ID NO: 129 - protein, 11 aa, Artificial Sequence
  Synthesized
AQAGTVVREAQ

SEQ ID NO: 130 - protein, 11 aa, Artificial Sequence
  Synthesized
AQAHAARETAQ

SEQ ID NO: 131 - protein, 11 aa, Artificial Sequence
  Synthesized
AQAHADTRVAQ

SEQ ID NO: 132 - protein, 11 aa, Artificial Sequence
  Synthesized
AQAHGTSAMAQ

SEQ ID NO: 133 - protein, 11 aa, Artificial Sequence
  Synthesized
AQAIKNHQLAQ

SEQ ID NO: 134 - protein, 11 aa, Artificial Sequence
  Synthesized
AQAILGTSAAQ

SEQ ID NO: 135 - protein, 11 aa, Artificial Sequence
  Synthesized
AQAINGSAMAQ

SEQ ID NO: 136 - protein, 11 aa, Artificial Sequence
  Synthesized
AQAIQSHHIAQ

SEQ ID NO: 137 - protein, 11 aa, Artificial Sequence
  Synthesized
AQAIRDTNAAQ

SEQ ID NO: 138 - protein, 11 aa, Artificial Sequence
  Synthesized
AQAIRPGGIAQ

SEQ ID NO: 139 - protein, 11 aa, Artificial Sequence
  Synthesized
AQAISPSAMAQ

SEQ ID NO: 140 - protein, 11 aa, Artificial Sequence
  Synthesized
AQAIVSGSTAQ

SEQ ID NO: 141 - protein, 11 aa, Artificial Sequence
  Synthesized
AQAKDVHHSAQ

SEQ ID NO: 142 - protein, 11 aa, Artificial Sequence
  Synthesized
AQAKENIHTAQ

SEQ ID NO: 143 - protein, 11 aa, Artificial Sequence
  Synthesized
AQAKLPRGVAQ

SEQ ID NO: 144 - protein, 11 aa, Artificial Sequence
  Synthesized
AQAKLPYMEAQ

SEQ ID NO: 145 - protein, 11 aa, Artificial Sequence
  Synthesized
AQAKPASNFAQ

SEQ ID NO: 146 - protein, 11 aa, Artificial Sequence
  Synthesized
AQAKQHNTTAQ

SEQ ID NO: 147 - protein, 11 aa, Artificial Sequence
  Synthesized
AQAKSRTEMAQ

SEQ ID NO: 148 - protein, 11 aa, Artificial Sequence
  Synthesized
AQAKSVNLSAQ

SEQ ID NO: 149 - protein, 11 aa, Artificial Sequence
  Synthesized
AQAKTEGYFAQ

SEQ ID NO: 150 - protein, 11 aa, Artificial Sequence
  Synthesized
AQAKTLNTLAQ

SEQ ID NO: 151 - protein, 11 aa, Artificial Sequence
  Synthesized
AQAKTRSNDAQ

SEQ ID NO: 152 - protein, 11 aa, Artificial Sequence
  Synthesized
AQAKVIQHSAQ

SEQ ID NO: 153 - protein, 11 aa, Artificial Sequence
  Synthesized
AQAKVMNPHAQ

SEQ ID NO: 154 - protein, 11 aa, Artificial Sequence
  Synthesized
AQALAKNQNAQ

SEQ ID NO: 155 - protein, 11 aa, Artificial Sequence
  Synthesized
AQALGRQLGAQ

SEQ ID NO: 156 - protein, 11 aa, Artificial Sequence
  Synthesized
AQALIKTSSAQ

SEQ ID NO: 157 - protein, 11 aa, Artificial Sequence
  Synthesized
AQALKESHPAQ

SEQ ID NO: 158 - protein, 11 aa, Artificial Sequence
  Synthesized
AQALKSLASAQ

SEQ ID NO: 159 - protein, 11 aa, Artificial Sequence
  Synthesized
AQALLDSPPAQ

SEQ ID NO: 160 - protein, 11 aa, Artificial Sequence
  Synthesized
AQALNDMGLAQ

SEQ ID NO: 161 - protein, 11 aa, Artificial Sequence
  Synthesized
AQALPSANRAQ

SEQ ID NO: 162 - protein, 11 aa, Artificial Sequence
  Synthesized
AQALQQSFAAQ

SEQ ID NO: 163 - protein, 11 aa, Artificial Sequence
  Synthesized
AQALQRPAPAQ

SEQ ID NO: 164 - protein, 11 aa, Artificial Sequence
  Synthesized
AQALRDTKFAQ

SEQ ID NO: 165 - protein, 11 aa, Artificial Sequence
  Synthesized
AQALRSNIGAQ

SEQ ID NO: 166 - protein, 11 aa, Artificial Sequence
  Synthesized
AQALRSVSPAQ

SEQ ID NO: 167 - protein, 11 aa, Artificial Sequence
  Synthesized
AQALSSARAAQ

SEQ ID NO: 168 - protein, 11 aa, Artificial Sequence
  Synthesized
AQALTDTRNAQ

SEQ ID NO: 169 - protein, 11 aa, Artificial Sequence
  Synthesized
AQALTGLSPAQ

SEQ ID NO: 170 - protein, 11 aa, Artificial Sequence
  Synthesized
AQALTNHSGAQ

SEQ ID NO: 171 - protein, 11 aa, Artificial Sequence
  Synthesized
AQALVQTRSAQ

SEQ ID NO: 172 - protein, 11 aa, Artificial Sequence
  Synthesized
AQAMASKVPAQ

SEQ ID NO: 173 - protein, 11 aa, Artificial Sequence
  Synthesized
AQAMFSTSRAQ

SEQ ID NO: 174 - protein, 11 aa, Artificial Sequence
  Synthesized
AQAMKTSPLAQ

SEQ ID NO: 175 - protein, 11 aa, Artificial Sequence
  Synthesized
AQAMQPLKMAQ

SEQ ID NO: 176 - protein, 11 aa, Artificial Sequence
  Synthesized
AQAMRHSAMAQ

SEQ ID NO: 177 - protein, 11 aa, Artificial Sequence
  Synthesized
AQAMRPGDLAQ

SEQ ID NO: 178 - protein, 11 aa, Artificial Sequence
  Synthesized
AQAMSPSPRAQ

SEQ ID NO: 179 - protein, 11 aa, Artificial Sequence
  Synthesized
AQAMTKMGIAQ

SEQ ID NO: 180 - protein, 11 aa, Artificial Sequence
  Synthesized
AQANATRVVAQ

SEQ ID NO: 181 - protein, 11 aa, Artificial Sequence
  Synthesized
AQANDLNRFAQ

SEQ ID NO: 182 - protein, 11 aa, Artificial Sequence
  Synthesized
AQANFTRLHAQ

SEQ ID NO: 183 - protein, 11 aa, Artificial Sequence
  Synthesized
AQANFTRLMAQ

SEQ ID NO: 184 - protein, 11 aa, Artificial Sequence
  Synthesized
AQANFTRYPAQ

SEQ ID NO: 185 - protein, 11 aa, Artificial Sequence
  Synthesized
AQANGKNILAQ

SEQ ID NO: 186 - protein, 11 aa, Artificial Sequence
  Synthesized
AQANGTRHHAQ

SEQ ID NO: 187 - protein, 11 aa, Artificial Sequence
  Synthesized
AQANITRKNAQ

SEQ ID NO: 188 - protein, 11 aa, Artificial Sequence
  Synthesized
AQANKTNSLAQ

SEQ ID NO: 189 - protein, 11 aa, Artificial Sequence
  Synthesized
AQANLPAPKAQ

SEQ ID NO: 190 - protein, 11 aa, Artificial Sequence
  Synthesized
AQANLQVPSAQ

SEQ ID NO: 191 - protein, 11 aa, Artificial Sequence
  Synthesized
AQANNKTFGAQ

SEQ ID NO: 192 - protein, 11 aa, Artificial Sequence
  Synthesized
AQANNTAPTAQ

SEQ ID NO: 193 - protein, 11 aa, Artificial Sequence
  Synthesized
AQANNTFDPAQ

SEQ ID NO: 194 - protein, 11 aa, Artificial Sequence
  Synthesized
AQANNTFKIAQ

SEQ ID NO: 195 - protein, 11 aa, Artificial Sequence
  Synthesized
AQANNTMLRAQ

SEQ ID NO: 196 - protein, 11 aa, Artificial Sequence
  Synthesized
AQANNTRRHAQ

SEQ ID NO: 197 - protein, 11 aa, Artificial Sequence
  Synthesized
AQANNTRRKAQ

SEQ ID NO: 198 - protein, 11 aa, Artificial Sequence
  Synthesized
AQANPGGASAQ

SEQ ID NO: 199 - protein, 11 aa, Artificial Sequence
  Synthesized
AQANPHTSTAQ

SEQ ID NO: 200 - protein, 11 aa, Artificial Sequence
  Synthesized
AQANPRKASAQ

SEQ ID NO: 201 - protein, 11 aa, Artificial Sequence
  Synthesized
AQANPRYFSAQ

SEQ ID NO: 202 - protein, 11 aa, Artificial Sequence
  Synthesized
AQANPTRHSAQ

SEQ ID NO: 203 - protein, 11 aa, Artificial Sequence
  Synthesized
AQANPVPRSAQ

SEQ ID NO: 204 - protein, 11 aa, Artificial Sequence
  Synthesized
AQANPVTRSAQ

SEQ ID NO: 205 - protein, 11 aa, Artificial Sequence
  Synthesized
AQANPVYRSAQ

SEQ ID NO: 206 - protein, 11 aa, Artificial Sequence
  Synthesized
AQANQLEKVAQ

SEQ ID NO: 207 - protein, 11 aa, Artificial Sequence
  Synthesized
AQANRDSTKAQ

SEQ ID NO: 208 - protein, 11 aa, Artificial Sequence
  Synthesized
AQANRLMNPAQ

SEQ ID NO: 209 - protein, 11 aa, Artificial Sequence
  Synthesized
AQANRTRISAQ

SEQ ID NO: 210 - protein, 11 aa, Artificial Sequence
  Synthesized
AQANSRLPTAQ

SEQ ID NO: 211 - protein, 11 aa, Artificial Sequence
  Synthesized
AQANSTRTTAQ

SEQ ID NO: 212 - protein, 11 aa, Artificial Sequence
  Synthesized
AQANTGTTFAQ

SEQ ID NO: 213 - protein, 11 aa, Artificial Sequence
  Synthesized
AQANTTKSSAQ

SEQ ID NO: 214 - protein, 11 aa, Artificial Sequence
  Synthesized
AQANTTRIPAQ

SEQ ID NO: 215 - protein, 11 aa, Artificial Sequence
  Synthesized
AQANVQSFMAQ

SEQ ID NO: 216 - protein, 11 aa, Artificial Sequence
  Synthesized
AQANVTRFFAQ

SEQ ID NO: 217 - protein, 11 aa, Artificial Sequence
  Synthesized
AQAPKASFMAQ

SEQ ID NO: 218 - protein, 11 aa, Artificial Sequence
  Synthesized
AQAPQGSLQAQ

SEQ ID NO: 219 - protein, 11 aa, Artificial Sequence
  Synthesized
AQAPSGIRGAQ

SEQ ID NO: 220 - protein, 11 aa, Artificial Sequence
  Synthesized
AQAQAALPLAQ

SEQ ID NO: 221 - protein, 11 aa, Artificial Sequence
  Synthesized
AQAQAGIHSAQ

SEQ ID NO: 222 - protein, 11 aa, Artificial Sequence
  Synthesized
AQAQKSHSEAQ

SEQ ID NO: 223 - protein, 11 aa, Artificial Sequence
  Synthesized
AQAQLPKPYAQ

SEQ ID NO: 224 - protein, 11 aa, Artificial Sequence
  Synthesized
AQAQNNRMAAQ

SEQ ID NO: 225 - protein, 11 aa, Artificial Sequence
  Synthesized
AQAQRAVTTAQ

SEQ ID NO: 226 - protein, 11 aa, Artificial Sequence
  Synthesized
AQAQRVGVIAQ

SEQ ID NO: 227 - protein, 11 aa, Artificial Sequence
  Synthesized
AQAQSRPLNAQ

SEQ ID NO: 228 - protein, 11 aa, Artificial Sequence
  Synthesized
AQAQSTRLAAQ

SEQ ID NO: 229 - protein, 11 aa, Artificial Sequence
  Synthesized
AQAQTNHVYAQ

SEQ ID NO: 230 - protein, 11 aa, Artificial Sequence
  Synthesized
AQAQVQREKAQ

SEQ ID NO: 231 - protein, 11 aa, Artificial Sequence
  Synthesized
AQARDKSLTAQ

SEQ ID NO: 232 - protein, 11 aa, Artificial Sequence
  Synthesized
AQARENTLKAQ

SEQ ID NO: 233 - protein, 11 aa, Artificial Sequence
  Synthesized
AQARESRSTAQ

SEQ ID NO: 234 - protein, 11 aa, Artificial Sequence
  Synthesized
AQARFPSAMAQ

SEQ ID NO: 235 - protein, 11 aa, Artificial Sequence
  Synthesized
AQARGNSLLAQ

SEQ ID NO: 236 - protein, 11 aa, Artificial Sequence
  Synthesized
AQARGQLSVAQ

SEQ ID NO: 237 - protein, 11 aa, Artificial Sequence
  Synthesized
AQARGRSAMAQ

SEQ ID NO: 238 - protein, 11 aa, Artificial Sequence
  Synthesized
AQARIQQSTAQ

SEQ ID NO: 239 - protein, 11 aa, Artificial Sequence
  Synthesized
AQARLAELTAQ

SEQ ID NO: 240 - protein, 11 aa, Artificial Sequence
  Synthesized
AQARLPGGKAQ

SEQ ID NO: 241 - protein, 11 aa, Artificial Sequence
  Synthesized
AQARMTPTQAQ

SEQ ID NO: 242 - protein, 11 aa, Artificial Sequence
  Synthesized
AQARPNGPLAQ

SEQ ID NO: 243 - protein, 11 aa, Artificial Sequence
  Synthesized
AQARSGIASAQ

SEQ ID NO: 244 - protein, 11 aa, Artificial Sequence
  Synthesized
AQARTSLTEAQ

SEQ ID NO: 245 - protein, 11 aa, Artificial Sequence
  Synthesized
AQARVELRSAQ

SEQ ID NO: 246 - protein, 11 aa, Artificial Sequence
  Synthesized
AQARVGATAAQ

SEQ ID NO: 247 - protein, 11 aa, Artificial Sequence
  Synthesized
AQARVGAVNAQ

SEQ ID NO: 248 - protein, 11 aa, Artificial Sequence
  Synthesized
AQARVQGLGAQ

SEQ ID NO: 249 - protein, 11 aa, Artificial Sequence
  Synthesized
AQARYSTTPAQ

SEQ ID NO: 250 - protein, 11 aa, Artificial Sequence
  Synthesized
AQASAITTVAQ

SEQ ID NO: 251 - protein, 11 aa, Artificial Sequence
  Synthesized
AQASAMSSRAQ

SEQ ID NO: 252 - protein, 11 aa, Artificial Sequence
  Synthesized
AQASAPPRSAQ

SEQ ID NO: 253 - protein, 11 aa, Artificial Sequence
  Synthesized
AQASDRNYLAQ

SEQ ID NO: 254 - protein, 11 aa, Artificial Sequence
  Synthesized
AQASEMRVTAQ

SEQ ID NO: 255 - protein, 11 aa, Artificial Sequence
  Synthesized
AQASGGRAYAQ

SEQ ID NO: 256 - protein, 11 aa, Artificial Sequence
  Synthesized
AQASHASPLAQ

SEQ ID NO: 257 - protein, 11 aa, Artificial Sequence
  Synthesized
AQASHVLRSAQ

SEQ ID NO: 258 - protein, 11 aa, Artificial Sequence
  Synthesized
AQASINTGKAQ

SEQ ID NO: 259 - protein, 11 aa, Artificial Sequence
  Synthesized
AQASKMLQSAQ

SEQ ID NO: 260 - protein, 11 aa, Artificial Sequence
  Synthesized
AQASKMSADAQ

SEQ ID NO: 261 - protein, 11 aa, Artificial Sequence
  Synthesized
AQASLPFRRAQ

SEQ ID NO: 262 - protein, 11 aa, Artificial Sequence
  Synthesized
AQASLPRRYAQ

SEQ ID NO: 263 - protein, 11 aa, Artificial Sequence
  Synthesized
AQASLSNTSAQ

SEQ ID NO: 264 - protein, 11 aa, Artificial Sequence
  Synthesized
AQASNMQNRAQ

SEQ ID NO: 265 - protein, 11 aa, Artificial Sequence
  Synthesized
AQASNTYSVAQ

SEQ ID NO: 266 - protein, 11 aa, Artificial Sequence
  Synthesized
AQASPQGRIAQ

SEQ ID NO: 267 - protein, 11 aa, Artificial Sequence
  Synthesized
AQASQGSLSAQ

SEQ ID NO: 268 - protein, 11 aa, Artificial Sequence
  Synthesized
AQASQRNEMAQ

SEQ ID NO: 269 - protein, 11 aa, Artificial Sequence
  Synthesized
AQASRASSSAQ

SEQ ID NO: 270 - protein, 11 aa, Artificial Sequence
  Synthesized
AQASRSTPLAQ

SEQ ID NO: 271 - protein, 11 aa, Artificial Sequence
  Synthesized
AQASRTLDGAQ

SEQ ID NO: 272 - protein, 11 aa, Artificial Sequence
  Synthesized
AQASRTMTPAQ

SEQ ID NO: 273 - protein, 11 aa, Artificial Sequence
  Synthesized
AQASSGKGLAQ

SEQ ID NO: 274 - protein, 11 aa, Artificial Sequence
  Synthesized
AQASSGPLTAQ

SEQ ID NO: 275 - protein, 11 aa, Artificial Sequence
  Synthesized
AQASSHHLKAQ

SEQ ID NO: 276 - protein, 11 aa, Artificial Sequence
  Synthesized
AQASSRGLTAQ

SEQ ID NO: 277 - protein, 11 aa, Artificial Sequence
  Synthesized
AQASSVLGQAQ

SEQ ID NO: 278 - protein, 11 aa, Artificial Sequence
  Synthesized
AQASSVVTSAQ

SEQ ID NO: 279 - protein, 11 aa, Artificial Sequence
  Synthesized
AQASTGSTAAQ

SEQ ID NO: 280 - protein, 11 aa, Artificial Sequence
  Synthesized
AQASTPSSKAQ

SEQ ID NO: 281 - protein, 11 aa, Artificial Sequence
  Synthesized
AQASTTALSAQ

SEQ ID NO: 282 - protein, 11 aa, Artificial Sequence
  Synthesized
AQASVGYVLAQ

SEQ ID NO: 283 - protein, 11 aa, Artificial Sequence
  Synthesized
AQASYSPSGAQ

SEQ ID NO: 284 - protein, 11 aa, Artificial Sequence
  Synthesized
AQATAKTVMAQ

SEQ ID NO: 285 - protein, 11 aa, Artificial Sequence
  Synthesized
AQATARNAVAQ

SEQ ID NO: 286 - protein, 11 aa, Artificial Sequence
  Synthesized
AQATASTLKAQ

SEQ ID NO: 287 - protein, 11 aa, Artificial Sequence
  Synthesized
AQATAVLTKAQ

SEQ ID NO: 288 - protein, 11 aa, Artificial Sequence
  Synthesized
AQATCKQFLAQ

SEQ ID NO: 289 - protein, 11 aa, Artificial Sequence
  Synthesized
AQATGKKFLAQ

SEQ ID NO: 290 - protein, 11 aa, Artificial Sequence
  Synthesized
AQATGKQFLAQ

SEQ ID NO: 291 - protein, 11 aa, Artificial Sequence
  Synthesized
AQATGKTVNAQ

SEQ ID NO: 292 - protein, 11 aa, Artificial Sequence
  Synthesized
AQATGNPSKAQ

SEQ ID NO: 293 - protein, 11 aa, Artificial Sequence
  Synthesized
AQATHFTSVAQ

SEQ ID NO: 294 - protein, 11 aa, Artificial Sequence
  Synthesized
AQATHGLLPAQ

SEQ ID NO: 295 - protein, 11 aa, Artificial Sequence
  Synthesized
AQATKNSRDAQ

SEQ ID NO: 296 - protein, 11 aa, Artificial Sequence
  Synthesized
AQATNLKYPAQ

SEQ ID NO: 297 - protein, 11 aa, Artificial Sequence
  Synthesized
AQATNLYREAQ

SEQ ID NO: 298 - protein, 11 aa, Artificial Sequence
  Synthesized
AQATPSARPAQ

SEQ ID NO: 299 - protein, 11 aa, Artificial Sequence
  Synthesized
AQATREPKPAQ

SEQ ID NO: 300 - protein, 11 aa, Artificial Sequence
  Synthesized
AQATRPAVLAQ

SEQ ID NO: 301 - protein, 11 aa, Artificial Sequence
  Synthesized
AQATRTTLAAQ

SEQ ID NO: 302 - protein, 11 aa, Artificial Sequence
  Synthesized
AQATSEKHLAQ

SEQ ID NO: 303 - protein, 11 aa, Artificial Sequence
  Synthesized
AQATSGSIAAQ

SEQ ID NO: 304 - protein, 11 aa, Artificial Sequence
  Synthesized
AQATSGTIPAQ

SEQ ID NO: 305 - protein, 11 aa, Artificial Sequence
  Synthesized
AQATSLNSKAQ

SEQ ID NO: 306 - protein, 11 aa, Artificial Sequence
  Synthesized
AQATSRSALAQ

SEQ ID NO: 307 - protein, 11 aa, Artificial Sequence
  Synthesized
AQATSYRESAQ

SEQ ID NO: 308 - protein, 11 aa, Artificial Sequence
  Synthesized
AQATTRSMHAQ

SEQ ID NO: 309 - protein, 11 aa, Artificial Sequence
  Synthesized
AQATVGKTVAQ

SEQ ID NO: 310 - protein, 11 aa, Artificial Sequence
  Synthesized
AQATYKQFLAQ

SEQ ID NO: 311 - protein, 11 aa, Artificial Sequence
  Synthesized
AQATYSASPAQ

SEQ ID NO: 312 - protein, 11 aa, Artificial Sequence
  Synthesized
AQAVASSRAAQ

SEQ ID NO: 313 - protein, 11 aa, Artificial Sequence
  Synthesized
AQAVDRNLRAQ

SEQ ID NO: 314 - protein, 11 aa, Artificial Sequence
  Synthesized
AQAVERTMFAQ

SEQ ID NO: 315 - protein, 11 aa, Artificial Sequence
  Synthesized
AQAVGHTTLAQ

SEQ ID NO: 316 - protein, 11 aa, Artificial Sequence
  Synthesized
AQAVHAPRAAQ

SEQ ID NO: 317 - protein, 11 aa, Artificial Sequence
  Synthesized
AQAVIGAPPAQ

SEQ ID NO: 318 - protein, 11 aa, Artificial Sequence
  Synthesized
AQAVKTEWGAQ

SEQ ID NO: 319 - protein, 11 aa, Artificial Sequence
  Synthesized
AQAVLKTIGAQ

SEQ ID NO: 320 - protein, 11 aa, Artificial Sequence
  Synthesized
AQAVLSASRAQ

SEQ ID NO: 321 - protein, 11 aa, Artificial Sequence
  Synthesized
AQAVPKSGPAQ

SEQ ID NO: 322 - protein, 11 aa, Artificial Sequence
  Synthesized
AQAVPVPSNAQ

SEQ ID NO: 323 - protein, 11 aa, Artificial Sequence
  Synthesized
AQAVVKSTYAQ

SEQ ID NO: 324 - protein, 11 aa, Artificial Sequence
  Synthesized
AQAYHHSFMAQ

SEQ ID NO: 325 - protein, 11 aa, Artificial Sequence
  Synthesized
AQAYKMSPAAQ

SEQ ID NO: 326 - protein, 11 aa, Artificial Sequence
  Synthesized
AQAYLPRHGAQ

SEQ ID NO: 327 - protein, 11 aa, Artificial Sequence
  Synthesized
AQAYLPRPRAQ

SEQ ID NO: 328 - protein, 11 aa, Artificial Sequence
  Synthesized
AQAYLPRSKAQ

SEQ ID NO: 329 - protein, 11 aa, Artificial Sequence
  Synthesized
AQAYPPTVGAQ

SEQ ID NO: 330 - protein, 11 aa, Artificial Sequence
  Synthesized
AQAYRPQTVAQ

SEQ ID NO: 331 - protein, 11 aa, Artificial Sequence
  Synthesized
AQAYSDRMSAQ

SEQ ID NO: 332 - protein, 11 aa, Artificial Sequence
  Synthesized
AQCLACVDPAQ

SEQ ID NO: 333 - protein, 11 aa, Artificial Sequence
  Synthesized
AQCMMSRCSAQ

SEQ ID NO: 334 - protein, 11 aa, Artificial Sequence
  Synthesized
AQCNSLQTAAQ

SEQ ID NO: 335 - protein, 11 aa, Artificial Sequence
  Synthesized
AQCTDLLMEAQ

SEQ ID NO: 336 - protein, 11 aa, Artificial Sequence
  Synthesized
AQCWGKQFLAQ

SEQ ID NO: 337 - protein, 11 aa, Artificial Sequence
  Synthesized
AQDAGASNRAQ

SEQ ID NO: 338 - protein, 11 aa, Artificial Sequence
  Synthesized
AQDAIISAMAQ

SEQ ID NO: 339 - protein, 11 aa, Artificial Sequence
  Synthesized
AQDAKKSNIAQ

SEQ ID NO: 340 - protein, 11 aa, Artificial Sequence
  Synthesized
AQDAKLQLRAQ

SEQ ID NO: 341 - protein, 11 aa, Artificial Sequence
  Synthesized
AQDALKRSPAQ

SEQ ID NO: 342 - protein, 11 aa, Artificial Sequence
  Synthesized
AQDALRSGSAQ

SEQ ID NO: 343 - protein, 11 aa, Artificial Sequence
  Synthesized
AQDANLHNRAQ

SEQ ID NO: 344 - protein, 11 aa, Artificial Sequence
  Synthesized
AQDAPTISKAQ

SEQ ID NO: 345 - protein, 11 aa, Artificial Sequence
  Synthesized
AQDARASSSAQ

SEQ ID NO: 346 - protein, 11 aa, Artificial Sequence
  Synthesized
AQDASHGKFAQ

SEQ ID NO: 347 - protein, 11 aa, Artificial Sequence
  Synthesized
AQDATGVIRAQ

SEQ ID NO: 348 - protein, 11 aa, Artificial Sequence
  Synthesized
AQDDAGVNAAQ

SEQ ID NO: 349 - protein, 11 aa, Artificial Sequence
  Synthesized
AQDDTRSGRAQ

SEQ ID NO: 350 - protein, 11 aa, Artificial Sequence
  Synthesized
AQDEFDSAMAQ

SEQ ID NO: 351 - protein, 11 aa, Artificial Sequence
  Synthesized
AQDEGLHNDAQ

SEQ ID NO: 352 - protein, 11 aa, Artificial Sequence
  Synthesized
AQDFIQRTPAQ

SEQ ID NO: 353 - protein, 11 aa, Artificial Sequence
  Synthesized
AQDFYGSAMAQ

SEQ ID NO: 354 - protein, 11 aa, Artificial Sequence
  Synthesized
AQDGATSFMAQ

SEQ ID NO: 355 - protein, 11 aa, Artificial Sequence
  Synthesized
AQDGHYCHSAQ

SEQ ID NO: 356 - protein, 11 aa, Artificial Sequence
  Synthesized
AQDGHYFHSAQ

SEQ ID NO: 357 - protein, 11 aa, Artificial Sequence
  Synthesized
AQDGHYGHSAQ

SEQ ID NO: 358 - protein, 11 aa, Artificial Sequence
  Synthesized
AQDGHYMHSAQ

SEQ ID NO: 359 - protein, 11 aa, Artificial Sequence
  Synthesized
AQDGHYPHSAQ

SEQ ID NO: 360 - protein, 11 aa, Artificial Sequence
  Synthesized
AQDGIRLTPAQ

SEQ ID NO: 361 - protein, 11 aa, Artificial Sequence
  Synthesized
AQDGKTSGLAQ

SEQ ID NO: 362 - protein, 11 aa, Artificial Sequence
  Synthesized
AQDGLPMRTAQ

SEQ ID NO: 363 - protein, 11 aa, Artificial Sequence
  Synthesized
AQDGLPRHRAQ

SEQ ID NO: 364 - protein, 11 aa, Artificial Sequence
  Synthesized
AQDGLPRMIAQ

SEQ ID NO: 365 - protein, 11 aa, Artificial Sequence
  Synthesized
AQDGLPTVFAQ

SEQ ID NO: 366 - protein, 11 aa, Artificial Sequence
  Synthesized
AQDGLRNVPAQ

SEQ ID NO: 367 - protein, 11 aa, Artificial Sequence
  Synthesized
AQDGRLTSVAQ

SEQ ID NO: 368 - protein, 11 aa, Artificial Sequence
  Synthesized
AQDGRQLLNAQ

SEQ ID NO: 369 - protein, 11 aa, Artificial Sequence
  Synthesized
AQDGYKSAMAQ

SEQ ID NO: 370 - protein, 11 aa, Artificial Sequence
  Synthesized
AQDHHIRVAAQ

SEQ ID NO: 371 - protein, 11 aa, Artificial Sequence
  Synthesized
AQDHKDSNIAQ

SEQ ID NO: 372 - protein, 11 aa, Artificial Sequence
  Synthesized
AQDHLPKFPAQ

SEQ ID NO: 373 - protein, 11 aa, Artificial Sequence
  Synthesized
AQDHQHLQYAQ

SEQ ID NO: 374 - protein, 11 aa, Artificial Sequence
  Synthesized
AQDHSKQRMAQ

SEQ ID NO: 375 - protein, 11 aa, Artificial Sequence
  Synthesized
AQDIPPSFMAQ

SEQ ID NO: 376 - protein, 11 aa, Artificial Sequence
  Synthesized
AQDITKFSSAQ

SEQ ID NO: 377 - protein, 11 aa, Artificial Sequence
  Synthesized
AQDKLPHGMAQ

SEQ ID NO: 378 - protein, 11 aa, Artificial Sequence
  Synthesized
AQDKNPHENAQ

SEQ ID NO: 379 - protein, 11 aa, Artificial Sequence
  Synthesized
AQDKRAVLTAQ

SEQ ID NO: 380 - protein, 11 aa, Artificial Sequence
  Synthesized
AQDKRLLSPAQ

SEQ ID NO: 381 - protein, 11 aa, Artificial Sequence
  Synthesized
AQDKRTIVMAQ

SEQ ID NO: 382 - protein, 11 aa, Artificial Sequence
  Synthesized
AQDKRVPNPAQ

SEQ ID NO: 383 - protein, 11 aa, Artificial Sequence
  Synthesized
AQDKYVTKAAQ

SEQ ID NO: 384 - protein, 11 aa, Artificial Sequence
  Synthesized
AQDLAKPTRAQ

SEQ ID NO: 385 - protein, 11 aa, Artificial Sequence
  Synthesized
AQDLGMGMKAQ

SEQ ID NO: 386 - protein, 11 aa, Artificial Sequence
  Synthesized
AQDLKLSAMAQ

SEQ ID NO: 387 - protein, 11 aa, Artificial Sequence
  Synthesized
AQDLKRTVDAQ

SEQ ID NO: 388 - protein, 11 aa, Artificial Sequence
  Synthesized
AQDLRQLQPAQ

SEQ ID NO: 389 - protein, 11 aa, Artificial Sequence
  Synthesized
AQDLSTARSAQ

SEQ ID NO: 390 - protein, 11 aa, Artificial Sequence
  Synthesized
AQDLTNTPLAQ

SEQ ID NO: 391 - protein, 11 aa, Artificial Sequence
  Synthesized
AQDMKGSRNAQ

SEQ ID NO: 392 - protein, 11 aa, Artificial Sequence
  Synthesized
AQDMKPNRNAQ

SEQ ID NO: 393 - protein, 11 aa, Artificial Sequence
  Synthesized
AQDMNRLKTAQ

SEQ ID NO: 394 - protein, 11 aa, Artificial Sequence
  Synthesized
AQDMRAKTNAQ

SEQ ID NO: 395 - protein, 11 aa, Artificial Sequence
  Synthesized
AQDNAQVNRAQ

SEQ ID NO: 396 - protein, 11 aa, Artificial Sequence
  Synthesized
AQDNDSSAMAQ

SEQ ID NO: 397 - protein, 11 aa, Artificial Sequence
  Synthesized
AQDNETRGNAQ

SEQ ID NO: 398 - protein, 11 aa, Artificial Sequence
  Synthesized
AQDNFHSFMAQ

SEQ ID NO: 399 - protein, 11 aa, Artificial Sequence
  Synthesized
AQDNHTRIIAQ

SEQ ID NO: 400 - protein, 11 aa, Artificial Sequence
  Synthesized
AQDNHTRTQAQ

SEQ ID NO: 401 - protein, 11 aa, Artificial Sequence
  Synthesized
AQDNKTRKGAQ

SEQ ID NO: 402 - protein, 11 aa, Artificial Sequence
  Synthesized
AQDNKVKSQAQ

SEQ ID NO: 403 - protein, 11 aa, Artificial Sequence
  Synthesized
AQDNLPREHAQ

SEQ ID NO: 404 - protein, 11 aa, Artificial Sequence
  Synthesized
AQDNNTDTPAQ

SEQ ID NO: 405 - protein, 11 aa, Artificial Sequence
  Synthesized
AQDNNTLGYAQ

SEQ ID NO: 406 - protein, 11 aa, Artificial Sequence
  Synthesized
AQDNNTLPGAQ

SEQ ID NO: 407 - protein, 11 aa, Artificial Sequence
  Synthesized
AQDNNTRHRAQ

SEQ ID NO: 408 - protein, 11 aa, Artificial Sequence
  Synthesized
AQDNNTYYFAQ

SEQ ID NO: 409 - protein, 11 aa, Artificial Sequence
  Synthesized
AQDNPGPGSAQ

SEQ ID NO: 410 - protein, 11 aa, Artificial Sequence
  Synthesized
AQDNPLRPSAQ

SEQ ID NO: 411 - protein, 11 aa, Artificial Sequence
  Synthesized
AQDNPVIRSAQ

SEQ ID NO: 412 - protein, 11 aa, Artificial Sequence
  Synthesized
AQDNPVPRSAQ

SEQ ID NO: 413 - protein, 11 aa, Artificial Sequence
  Synthesized
AQDNPVVRSAQ

SEQ ID NO: 414 - protein, 11 aa, Artificial Sequence
  Synthesized
AQDNRVPRNAQ

SEQ ID NO: 415 - protein, 11 aa, Artificial Sequence
  Synthesized
AQDNTVRKPAQ

SEQ ID NO: 416 - protein, 11 aa, Artificial Sequence
  Synthesized
AQDNYTRKTAQ

SEQ ID NO: 417 - protein, 11 aa, Artificial Sequence
  Synthesized
AQDPHHATKAQ

SEQ ID NO: 418 - protein, 11 aa, Artificial Sequence
  Synthesized
AQDPLPRGAAQ

SEQ ID NO: 419 - protein, 11 aa, Artificial Sequence
  Synthesized
AQDPRVSPMAQ

SEQ ID NO: 420 - protein, 11 aa, Artificial Sequence
  Synthesized
AQDQQASRDAQ

SEQ ID NO: 421 - protein, 11 aa, Artificial Sequence
  Synthesized
AQDQRKLMSAQ

SEQ ID NO: 422 - protein, 11 aa, Artificial Sequence
  Synthesized
AQDQRTSPRAQ

SEQ ID NO: 423 - protein, 11 aa, Artificial Sequence
  Synthesized
AQDQSKTRVAQ

SEQ ID NO: 424 - protein, 11 aa, Artificial Sequence
  Synthesized
AQDRDTSLTAQ

SEQ ID NO: 425 - protein, 11 aa, Artificial Sequence
  Synthesized
AQDREGKIRAQ

SEQ ID NO: 426 - protein, 11 aa, Artificial Sequence
  Synthesized
AQDRENFNNAQ

SEQ ID NO: 427 - protein, 11 aa, Artificial Sequence
  Synthesized
AQDRIQSHQAQ

SEQ ID NO: 428 - protein, 11 aa, Artificial Sequence
  Synthesized
AQDRLMPTSAQ

SEQ ID NO: 429 - protein, 11 aa, Artificial Sequence
  Synthesized
AQDRLNSRSAQ

SEQ ID NO: 430 - protein, 11 aa, Artificial Sequence
  Synthesized
AQDRLQPIKAQ

SEQ ID NO: 431 - protein, 11 aa, Artificial Sequence
  Synthesized
AQDRLVKSNAQ

SEQ ID NO: 432 - protein, 11 aa, Artificial Sequence
  Synthesized
AQDRLVNVNAQ

SEQ ID NO: 433 - protein, 11 aa, Artificial Sequence
  Synthesized
AQDRRPNASAQ

SEQ ID NO: 434 - protein, 11 aa, Artificial Sequence
  Synthesized
AQDRSFRHTAQ

SEQ ID NO: 435 - protein, 11 aa, Artificial Sequence
  Synthesized
AQDRSMMKTAQ

SEQ ID NO: 436 - protein, 11 aa, Artificial Sequence
  Synthesized
AQDRSRLDIAQ

SEQ ID NO: 437 - protein, 11 aa, Artificial Sequence
  Synthesized
AQDRSVNQSAQ

SEQ ID NO: 438 - protein, 11 aa, Artificial Sequence
  Synthesized
AQDRTTVSEAQ

SEQ ID NO: 439 - protein, 11 aa, Artificial Sequence
  Synthesized
AQDSLTKQMAQ

SEQ ID NO: 440 - protein, 11 aa, Artificial Sequence
  Synthesized
AQDSLTPQNAQ

SEQ ID NO: 441 - protein, 11 aa, Artificial Sequence
  Synthesized
AQDSMSERNAQ

SEQ ID NO: 442 - protein, 11 aa, Artificial Sequence
  Synthesized
AQDSQSCHLAQ

SEQ ID NO: 443 - protein, 11 aa, Artificial Sequence
  Synthesized
AQDSQSWHLAQ

SEQ ID NO: 444 - protein, 11 aa, Artificial Sequence
  Synthesized
AQDSQTMALAQ

SEQ ID NO: 445 - protein, 11 aa, Artificial Sequence
  Synthesized
AQDSSKLLVAQ

SEQ ID NO: 446 - protein, 11 aa, Artificial Sequence
  Synthesized
AQDSSKPLKAQ

SEQ ID NO: 447 - protein, 11 aa, Artificial Sequence
  Synthesized
AQDSSYSSRAQ

SEQ ID NO: 448 - protein, 11 aa, Artificial Sequence
  Synthesized
AQDSTMSSRAQ

SEQ ID NO: 449 - protein, 11 aa, Artificial Sequence
  Synthesized
AQDSVAERNAQ

SEQ ID NO: 450 - protein, 11 aa, Artificial Sequence
  Synthesized
AQDSVRAGIAQ

SEQ ID NO: 451 - protein, 11 aa, Artificial Sequence
  Synthesized
AQDSVYSFMAQ

SEQ ID NO: 452 - protein, 11 aa, Artificial Sequence
  Synthesized
AQDTAASYMAQ

SEQ ID NO: 453 - protein, 11 aa, Artificial Sequence
  Synthesized
AQDTAKQIYAQ

SEQ ID NO: 454 - protein, 11 aa, Artificial Sequence
  Synthesized
AQDTGPSAMAQ

SEQ ID NO: 455 - protein, 11 aa, Artificial Sequence
  Synthesized
AQDTIRTSAAQ

SEQ ID NO: 456 - protein, 11 aa, Artificial Sequence
  Synthesized
AQDTKQFRAAQ

SEQ ID NO: 457 - protein, 11 aa, Artificial Sequence
  Synthesized
AQDTQTVNFAQ

SEQ ID NO: 458 - protein, 11 aa, Artificial Sequence
  Synthesized
AQDTRNVELAQ

SEQ ID NO: 459 - protein, 11 aa, Artificial Sequence
  Synthesized
AQDTSIQNLAQ

SEQ ID NO: 460 - protein, 11 aa, Artificial Sequence
  Synthesized
AQDTTQFTRAQ

SEQ ID NO: 461 - protein, 11 aa, Artificial Sequence
  Synthesized
AQDVKAEQEAQ

SEQ ID NO: 462 - protein, 11 aa, Artificial Sequence
  Synthesized
AQDVKSDVYAQ

SEQ ID NO: 463 - protein, 11 aa, Artificial Sequence
  Synthesized
AQDVLPRQPAQ

SEQ ID NO: 464 - protein, 11 aa, Artificial Sequence
  Synthesized
AQDVRSLHSAQ

SEQ ID NO: 465 - protein, 11 aa, Artificial Sequence
  Synthesized
AQDVRSLSKAQ

SEQ ID NO: 466 - protein, 11 aa, Artificial Sequence
  Synthesized
AQDVSGNKWAQ

SEQ ID NO: 467 - protein, 11 aa, Artificial Sequence
  Synthesized
AQDVSSFVPAQ

SEQ ID NO: 468 - protein, 11 aa, Artificial Sequence
  Synthesized
AQDVTAGLHAQ

SEQ ID NO: 469 - protein, 11 aa, Artificial Sequence
  Synthesized
AQDVVVTSRAQ

SEQ ID NO: 470 - protein, 11 aa, Artificial Sequence
  Synthesized
AQDYASRNMAQ

SEQ ID NO: 471 - protein, 11 aa, Artificial Sequence
  Synthesized
AQDYKAGGTAQ

SEQ ID NO: 472 - protein, 11 aa, Artificial Sequence
  Synthesized
AQDYLPRSVAQ

SEQ ID NO: 473 - protein, 11 aa, Artificial Sequence
  Synthesized
AQEARSLNSAQ

SEQ ID NO: 474 - protein, 11 aa, Artificial Sequence
  Synthesized
AQEFARSFMAQ

SEQ ID NO: 475 - protein, 11 aa, Artificial Sequence
  Synthesized
AQEFKVTDVAQ

SEQ ID NO: 476 - protein, 11 aa, Artificial Sequence
  Synthesized
AQEFLPGVNAQ

SEQ ID NO: 477 - protein, 11 aa, Artificial Sequence
  Synthesized
AQEGFLSAMAQ

SEQ ID NO: 478 - protein, 11 aa, Artificial Sequence
  Synthesized
AQEGIRTHIAQ

SEQ ID NO: 479 - protein, 11 aa, Artificial Sequence
  Synthesized
AQEGKIHRSAQ

SEQ ID NO: 480 - protein, 11 aa, Artificial Sequence
  Synthesized
AQEGLVEIRAQ

SEQ ID NO: 481 - protein, 11 aa, Artificial Sequence
  Synthesized
AQEHLPRPPAQ

SEQ ID NO: 482 - protein, 11 aa, Artificial Sequence
  Synthesized
AQEHPLSAMAQ

SEQ ID NO: 483 - protein, 11 aa, Artificial Sequence
  Synthesized
AQEHRLTATAQ

SEQ ID NO: 484 - protein, 11 aa, Artificial Sequence
  Synthesized
AQEKAGVNKAQ

SEQ ID NO: 485 - protein, 11 aa, Artificial Sequence
  Synthesized
AQEKRSDLSAQ

SEQ ID NO: 486 - protein, 11 aa, Artificial Sequence
  Synthesized
AQEKRTLELAQ

SEQ ID NO: 487 - protein, 11 aa, Artificial Sequence
  Synthesized
AQELARTAGAQ

SEQ ID NO: 488 - protein, 11 aa, Artificial Sequence
  Synthesized
AQELHRNHAAQ

SEQ ID NO: 489 - protein, 11 aa, Artificial Sequence
  Synthesized
AQELKGRYSAQ

SEQ ID NO: 490 - protein, 11 aa, Artificial Sequence
  Synthesized
AQELLQTSKAQ

SEQ ID NO: 491 - protein, 11 aa, Artificial Sequence
  Synthesized
AQELNLRSSAQ

SEQ ID NO: 492 - protein, 11 aa, Artificial Sequence
  Synthesized
AQELSGSTTAQ

SEQ ID NO: 493 - protein, 11 aa, Artificial Sequence
  Synthesized
AQELYRNASAQ

SEQ ID NO: 494 - protein, 11 aa, Artificial Sequence
  Synthesized
AQEMAATRHAQ

SEQ ID NO: 495 - protein, 11 aa, Artificial Sequence
  Synthesized
AQEMEHQKTAQ

SEQ ID NO: 496 - protein, 11 aa, Artificial Sequence
  Synthesized
AQENGTRRQAQ

SEQ ID NO: 497 - protein, 11 aa, Artificial Sequence
  Synthesized
AQENGTRYFAQ

SEQ ID NO: 498 - protein, 11 aa, Artificial Sequence
  Synthesized
AQENHTRPHAQ

SEQ ID NO: 499 - protein, 11 aa, Artificial Sequence
  Synthesized
AQENHVRSSAQ

SEQ ID NO: 500 - protein, 11 aa, Artificial Sequence
  Synthesized
AQENKIKTNAQ

SEQ ID NO: 501 - protein, 11 aa, Artificial Sequence
  Synthesized
AQENKTRDKAQ

SEQ ID NO: 502 - protein, 11 aa, Artificial Sequence
  Synthesized
AQENNTFGNAQ

SEQ ID NO: 503 - protein, 11 aa, Artificial Sequence
  Synthesized
AQENNTHYPAQ

SEQ ID NO: 504 - protein, 11 aa, Artificial Sequence
  Synthesized
AQENNTPGPAQ

SEQ ID NO: 505 - protein, 11 aa, Artificial Sequence
  Synthesized
AQENNTPKQAQ

SEQ ID NO: 506 - protein, 11 aa, Artificial Sequence
  Synthesized
AQENNTPVAAQ

SEQ ID NO: 507 - protein, 11 aa, Artificial Sequence
  Synthesized
AQENNTRDYAQ

SEQ ID NO: 508 - protein, 11 aa, Artificial Sequence
  Synthesized
AQENNTRPHAQ

SEQ ID NO: 509 - protein, 11 aa, Artificial Sequence
  Synthesized
AQENNTYEDAQ

SEQ ID NO: 510 - protein, 11 aa, Artificial Sequence
  Synthesized
AQENNTYGEAQ

SEQ ID NO: 511 - protein, 11 aa, Artificial Sequence
  Synthesized
AQENPHGYSAQ

SEQ ID NO: 512 - protein, 11 aa, Artificial Sequence
  Synthesized
AQENPKPESAQ

SEQ ID NO: 513 - protein, 11 aa, Artificial Sequence
  Synthesized
AQENPPEQSAQ

SEQ ID NO: 514 - protein, 11 aa, Artificial Sequence
  Synthesized
AQENPVHRSAQ

SEQ ID NO: 515 - protein, 11 aa, Artificial Sequence
  Synthesized
AQENPVNRSAQ

SEQ ID NO: 516 - protein, 11 aa, Artificial Sequence
  Synthesized
AQENPVSRSAQ

SEQ ID NO: 517 - protein, 11 aa, Artificial Sequence
  Synthesized
AQENQVRNTAQ

SEQ ID NO: 518 - protein, 11 aa, Artificial Sequence
  Synthesized
AQENSTKSLAQ

SEQ ID NO: 519 - protein, 11 aa, Artificial Sequence
  Synthesized
AQENVTRRPAQ

SEQ ID NO: 520 - protein, 11 aa, Artificial Sequence
  Synthesized
AQENVTRVSAQ

SEQ ID NO: 521 - protein, 11 aa, Artificial Sequence
  Synthesized
AQENYTRQDAQ

SEQ ID NO: 522 - protein, 11 aa, Artificial Sequence
  Synthesized
AQEPKNAVFAQ

SEQ ID NO: 523 - protein, 11 aa, Artificial Sequence
  Synthesized
AQEQDHYKSAQ

SEQ ID NO: 524 - protein, 11 aa, Artificial Sequence
  Synthesized
AQERALSSEAQ

SEQ ID NO: 525 - protein, 11 aa, Artificial Sequence
  Synthesized
AQERASNNGAQ

SEQ ID NO: 526 - protein, 11 aa, Artificial Sequence
  Synthesized
AQEREYSAMAQ

SEQ ID NO: 527 - protein, 11 aa, Artificial Sequence
  Synthesized
AQERFQEKVAQ

SEQ ID NO: 528 - protein, 11 aa, Artificial Sequence
  Synthesized
AQERHFSFMAQ

SEQ ID NO: 529 - protein, 11 aa, Artificial Sequence
  Synthesized
AQERHHSFMAQ

SEQ ID NO: 530 - protein, 11 aa, Artificial Sequence
  Synthesized
AQERHQHANAQ

SEQ ID NO: 531 - protein, 11 aa, Artificial Sequence
  Synthesized
AQERKMTTLAQ

SEQ ID NO: 532 - protein, 11 aa, Artificial Sequence
  Synthesized
AQERLPDKHAQ

SEQ ID NO: 533 - protein, 11 aa, Artificial Sequence
  Synthesized
AQERLPQTAAQ

SEQ ID NO: 534 - protein, 11 aa, Artificial Sequence
  Synthesized
AQERLQSPKAQ

SEQ ID NO: 535 - protein, 11 aa, Artificial Sequence
  Synthesized
AQERNKQTPAQ

SEQ ID NO: 536 - protein, 11 aa, Artificial Sequence
  Synthesized
AQERPASAMAQ

SEQ ID NO: 537 - protein, 11 aa, Artificial Sequence
  Synthesized
AQERTESSLAQ

SEQ ID NO: 538 - protein, 11 aa, Artificial Sequence
  Synthesized
AQESIGDQSAQ

SEQ ID NO: 539 - protein, 11 aa, Artificial Sequence
  Synthesized
AQESLPRRSAQ

SEQ ID NO: 540 - protein, 11 aa, Artificial Sequence
  Synthesized
AQESMTGVLAQ

SEQ ID NO: 541 - protein, 11 aa, Artificial Sequence
  Synthesized
AQESMTNRTAQ

SEQ ID NO: 542 - protein, 11 aa, Artificial Sequence
  Synthesized
AQESRISMQAQ

SEQ ID NO: 543 - protein, 11 aa, Artificial Sequence
  Synthesized
AQESRSSRVAQ

SEQ ID NO: 544 - protein, 11 aa, Artificial Sequence
  Synthesized
AQESRSSYQAQ

SEQ ID NO: 545 - protein, 11 aa, Artificial Sequence
  Synthesized
AQESSSVLHAQ

SEQ ID NO: 546 - protein, 11 aa, Artificial Sequence
  Synthesized
AQESTVDTRAQ

SEQ ID NO: 547 - protein, 11 aa, Artificial Sequence
  Synthesized
AQESVSSLSAQ

SEQ ID NO: 548 - protein, 11 aa, Artificial Sequence
  Synthesized
AQESVTRGDAQ

SEQ ID NO: 549 - protein, 11 aa, Artificial Sequence
  Synthesized
AQETGKQFLAQ

SEQ ID NO: 550 - protein, 11 aa, Artificial Sequence
  Synthesized
AQETGVRNAAQ

SEQ ID NO: 551 - protein, 11 aa, Artificial Sequence
  Synthesized
AQETHPSAMAQ

SEQ ID NO: 552 - protein, 11 aa, Artificial Sequence
  Synthesized
AQETSRTSSAQ

SEQ ID NO: 553 - protein, 11 aa, Artificial Sequence
  Synthesized
AQEVKRLSAAQ

SEQ ID NO: 554 - protein, 11 aa, Artificial Sequence
  Synthesized
AQEYDRSKSAQ

SEQ ID NO: 555 - protein, 11 aa, Artificial Sequence
  Synthesized
AQEYLPYHKAQ

SEQ ID NO: 556 - protein, 11 aa, Artificial Sequence
  Synthesized
AQFAGIPGQAQ

SEQ ID NO: 557 - protein, 11 aa, Artificial Sequence
  Synthesized
AQFALPNGYAQ

SEQ ID NO: 558 - protein, 11 aa, Artificial Sequence
  Synthesized
AQFAMMSAMAQ

SEQ ID NO: 559 - protein, 11 aa, Artificial Sequence
  Synthesized
AQFASKSTHAQ

SEQ ID NO: 560 - protein, 11 aa, Artificial Sequence
  Synthesized
AQFAYHSFMAQ

SEQ ID NO: 561 - protein, 11 aa, Artificial Sequence
  Synthesized
AQFDKTNRGAQ

SEQ ID NO: 562 - protein, 11 aa, Artificial Sequence
  Synthesized
AQFDLSNMKAQ

SEQ ID NO: 563 - protein, 11 aa, Artificial Sequence
  Synthesized
AQFEKNSRPAQ

SEQ ID NO: 564 - protein, 11 aa, Artificial Sequence
  Synthesized
AQFELPRPHAQ

SEQ ID NO: 565 - protein, 11 aa, Artificial Sequence
  Synthesized
AQFFGGSFMAQ

SEQ ID NO: 566 - protein, 11 aa, Artificial Sequence
  Synthesized
AQFFGQSFMAQ

SEQ ID NO: 567 - protein, 11 aa, Artificial Sequence
  Synthesized
AQFFPYSFMAQ

SEQ ID NO: 568 - protein, 11 aa, Artificial Sequence
  Synthesized
AQFGGDRTRAQ

SEQ ID NO: 569 - protein, 11 aa, Artificial Sequence
  Synthesized
AQFGGLSAMAQ

SEQ ID NO: 570 - protein, 11 aa, Artificial Sequence
  Synthesized
AQFGHHSAMAQ

SEQ ID NO: 571 - protein, 11 aa, Artificial Sequence
  Synthesized
AQFGIISFMAQ

SEQ ID NO: 572 - protein, 11 aa, Artificial Sequence
  Synthesized
AQFGIVTNNAQ

SEQ ID NO: 573 - protein, 11 aa, Artificial Sequence
  Synthesized
AQFGKTVVSAQ

SEQ ID NO: 574 - protein, 11 aa, Artificial Sequence
  Synthesized
AQFGLERNNAQ

SEQ ID NO: 575 - protein, 11 aa, Artificial Sequence
  Synthesized
AQFGLKNIPAQ

SEQ ID NO: 576 - protein, 11 aa, Artificial Sequence
  Synthesized
AQFGPFSAMAQ

SEQ ID NO: 577 - protein, 11 aa, Artificial Sequence
  Synthesized
AQFGPQSFMAQ

SEQ ID NO: 578 - protein, 11 aa, Artificial Sequence
  Synthesized
AQFGQKSLQAQ

SEQ ID NO: 579 - protein, 11 aa, Artificial Sequence
  Synthesized
AQFGRIGSAAQ

SEQ ID NO: 580 - protein, 11 aa, Artificial Sequence
  Synthesized
AQFGSVPKNAQ

SEQ ID NO: 581 - protein, 11 aa, Artificial Sequence
  Synthesized
AQFHDDSAMAQ

SEQ ID NO: 582 - protein, 11 aa, Artificial Sequence
  Synthesized
AQFHIDSFMAQ

SEQ ID NO: 583 - protein, 11 aa, Artificial Sequence
  Synthesized
AQFHLPMTSAQ

SEQ ID NO: 584 - protein, 11 aa, Artificial Sequence
  Synthesized
AQFHLPRGNAQ

SEQ ID NO: 585 - protein, 11 aa, Artificial Sequence
  Synthesized
AQFHLPRHYAQ

SEQ ID NO: 586 - protein, 11 aa, Artificial Sequence
  Synthesized
AQFHLPRQHAQ

SEQ ID NO: 587 - protein, 11 aa, Artificial Sequence
  Synthesized
AQFHPGSFMAQ

SEQ ID NO: 588 - protein, 11 aa, Artificial Sequence
  Synthesized
AQFHRTSAMAQ

SEQ ID NO: 589 - protein, 11 aa, Artificial Sequence
  Synthesized
AQFHTQSAMAQ

SEQ ID NO: 590 - protein, 11 aa, Artificial Sequence
  Synthesized
AQFIGGLSAAQ

SEQ ID NO: 591 - protein, 11 aa, Artificial Sequence
  Synthesized
AQFINGSFMAQ

SEQ ID NO: 592 - protein, 11 aa, Artificial Sequence
  Synthesized
AQFIPHSFMAQ

SEQ ID NO: 593 - protein, 11 aa, Artificial Sequence
  Synthesized
AQFKSVKAEAQ

SEQ ID NO: 594 - protein, 11 aa, Artificial Sequence
  Synthesized
AQFLLPRGYAQ

SEQ ID NO: 595 - protein, 11 aa, Artificial Sequence
  Synthesized
AQFLTAGSKAQ

SEQ ID NO: 596 - protein, 11 aa, Artificial Sequence
  Synthesized
AQFMISSAMAQ

SEQ ID NO: 597 - protein, 11 aa, Artificial Sequence
  Synthesized
AQFNANPLKAQ

SEQ ID NO: 598 - protein, 11 aa, Artificial Sequence
  Synthesized
AQFNARGSSAQ

SEQ ID NO: 599 - protein, 11 aa, Artificial Sequence
  Synthesized
AQFNDCTFIAQ

SEQ ID NO: 600 - protein, 11 aa, Artificial Sequence
  Synthesized
AQFNDCTWIAQ

SEQ ID NO: 601 - protein, 11 aa, Artificial Sequence
  Synthesized
AQFNDETCIAQ

SEQ ID NO: 602 - protein, 11 aa, Artificial Sequence
  Synthesized
AQFNDFTFIAQ

SEQ ID NO: 603 - protein, 11 aa, Artificial Sequence
  Synthesized
AQFNDITCIAQ

SEQ ID NO: 604 - protein, 11 aa, Artificial Sequence
  Synthesized
AQFNDITFIAQ

SEQ ID NO: 605 - protein, 11 aa, Artificial Sequence
  Synthesized
AQFNDITWIAQ

SEQ ID NO: 606 - protein, 11 aa, Artificial Sequence
  Synthesized
AQFNDLTTIAQ

SEQ ID NO: 607 - protein, 11 aa, Artificial Sequence
  Synthesized
AQFNDYTWIAQ

SEQ ID NO: 608 - protein, 11 aa, Artificial Sequence
  Synthesized
AQFNFTRKIAQ

SEQ ID NO: 609 - protein, 11 aa, Artificial Sequence
  Synthesized
AQFNGTRHFAQ

SEQ ID NO: 610 - protein, 11 aa, Artificial Sequence
  Synthesized
AQFNGTRSHAQ

SEQ ID NO: 611 - protein, 11 aa, Artificial Sequence
  Synthesized
AQFNHTRFPAQ

SEQ ID NO: 612 - protein, 11 aa, Artificial Sequence
  Synthesized
AQFNHTRIMAQ

SEQ ID NO: 613 - protein, 11 aa, Artificial Sequence
  Synthesized
AQFNHTRRPAQ

SEQ ID NO: 614 - protein, 11 aa, Artificial Sequence
  Synthesized
AQFNITRGHAQ

SEQ ID NO: 615 - protein, 11 aa, Artificial Sequence
  Synthesized
AQFNLPYHGAQ

SEQ ID NO: 616 - protein, 11 aa, Artificial Sequence
  Synthesized
AQFNLSNEMAQ

SEQ ID NO: 617 - protein, 11 aa, Artificial Sequence
  Synthesized
AQFNMTRFKAQ

SEQ ID NO: 618 - protein, 11 aa, Artificial Sequence
  Synthesized
AQFNMTRTGAQ

SEQ ID NO: 619 - protein, 11 aa, Artificial Sequence
  Synthesized
AQFNNTEPAAQ

SEQ ID NO: 620 - protein, 11 aa, Artificial Sequence
  Synthesized
AQFNNTFKRAQ

SEQ ID NO: 621 - protein, 11 aa, Artificial Sequence
  Synthesized
AQFNNTFYSAQ

SEQ ID NO: 622 - protein, 11 aa, Artificial Sequence
  Synthesized
AQFNNTGEHAQ

SEQ ID NO: 623 - protein, 11 aa, Artificial Sequence
  Synthesized
AQFNNTHHIAQ

SEQ ID NO: 624 - protein, 11 aa, Artificial Sequence
  Synthesized
AQFNNTILPAQ

SEQ ID NO: 625 - protein, 11 aa, Artificial Sequence
  Synthesized
AQFNNTKQHAQ

SEQ ID NO: 626 - protein, 11 aa, Artificial Sequence
  Synthesized
AQFNNTPGRAQ

SEQ ID NO: 627 - protein, 11 aa, Artificial Sequence
  Synthesized
AQFNNTPYAAQ

SEQ ID NO: 628 - protein, 11 aa, Artificial Sequence
  Synthesized
AQFNNTQHFAQ

SEQ ID NO: 629 - protein, 11 aa, Artificial Sequence
  Synthesized
AQFNNTRHYAQ

SEQ ID NO: 630 - protein, 11 aa, Artificial Sequence
  Synthesized
AQFNNTVAQAQ

SEQ ID NO: 631 - protein, 11 aa, Artificial Sequence
  Synthesized
AQFNNTYRAAQ

SEQ ID NO: 632 - protein, 11 aa, Artificial Sequence
  Synthesized
AQFNPIYGSAQ

SEQ ID NO: 633 - protein, 11 aa, Artificial Sequence
  Synthesized
AQFNPMRFSAQ

SEQ ID NO: 634 - protein, 11 aa, Artificial Sequence
  Synthesized
AQFNPMVGSAQ

SEQ ID NO: 635 - protein, 11 aa, Artificial Sequence
  Synthesized
AQFNPRRISAQ

SEQ ID NO: 636 - protein, 11 aa, Artificial Sequence
  Synthesized
AQFNPVHRSAQ

SEQ ID NO: 637 - protein, 11 aa, Artificial Sequence
  Synthesized
AQFNPVKRSAQ

SEQ ID NO: 638 - protein, 11 aa, Artificial Sequence
  Synthesized
AQFNPVLRSAQ

SEQ ID NO: 639 - protein, 11 aa, Artificial Sequence
  Synthesized
AQFNPYSSSAQ

SEQ ID NO: 640 - protein, 11 aa, Artificial Sequence
  Synthesized
AQFNRTRNSAQ

SEQ ID NO: 641 - protein, 11 aa, Artificial Sequence
  Synthesized
AQFNSLGNPAQ

SEQ ID NO: 642 - protein, 11 aa, Artificial Sequence
  Synthesized
AQFNSLSSAAQ

SEQ ID NO: 643 - protein, 11 aa, Artificial Sequence
  Synthesized
AQFNSTKVVAQ

SEQ ID NO: 644 - protein, 11 aa, Artificial Sequence
  Synthesized
AQFNTTRAHAQ

SEQ ID NO: 645 - protein, 11 aa, Artificial Sequence
  Synthesized
AQFNVTRMSAQ

SEQ ID NO: 646 - protein, 11 aa, Artificial Sequence
  Synthesized
AQFNYTRPGAQ

SEQ ID NO: 647 - protein, 11 aa, Artificial Sequence
  Synthesized
AQFNYTRPHAQ

SEQ ID NO: 648 - protein, 11 aa, Artificial Sequence
  Synthesized
AQFPGKSDLAQ

SEQ ID NO: 649 - protein, 11 aa, Artificial Sequence
  Synthesized
AQFPHTSAMAQ

SEQ ID NO: 650 - protein, 11 aa, Artificial Sequence
  Synthesized
AQFPKGQSNAQ

SEQ ID NO: 651 - protein, 11 aa, Artificial Sequence
  Synthesized
AQFPKNGRDAQ

SEQ ID NO: 652 - protein, 11 aa, Artificial Sequence
  Synthesized
AQFPLPIHAAQ

SEQ ID NO: 653 - protein, 11 aa, Artificial Sequence
  Synthesized
AQFPLPRPYAQ

SEQ ID NO: 654 - protein, 11 aa, Artificial Sequence
  Synthesized
AQFPLPSPTAQ

SEQ ID NO: 655 - protein, 11 aa, Artificial Sequence
  Synthesized
AQFPNTRQDAQ

SEQ ID NO: 656 - protein, 11 aa, Artificial Sequence
  Synthesized
AQFPPGSFMAQ

SEQ ID NO: 657 - protein, 11 aa, Artificial Sequence
  Synthesized
AQFPQSSASAQ

SEQ ID NO: 658 - protein, 11 aa, Artificial Sequence
  Synthesized
AQFPRGSFMAQ

SEQ ID NO: 659 - protein, 11 aa, Artificial Sequence
  Synthesized
AQFPRSADVAQ

SEQ ID NO: 660 - protein, 11 aa, Artificial Sequence
  Synthesized
AQFQASKGTAQ

SEQ ID NO: 661 - protein, 11 aa, Artificial Sequence
  Synthesized
AQFQFPSAMAQ

SEQ ID NO: 662 - protein, 11 aa, Artificial Sequence
  Synthesized
AQFQLPRHKAQ

SEQ ID NO: 663 - protein, 11 aa, Artificial Sequence
  Synthesized
AQFQSANDKAQ

SEQ ID NO: 664 - protein, 11 aa, Artificial Sequence
  Synthesized
AQFQSEHSLAQ

SEQ ID NO: 665 - protein, 11 aa, Artificial Sequence
  Synthesized
AQFQTCHVGAQ

SEQ ID NO: 666 - protein, 11 aa, Artificial Sequence
  Synthesized
AQFQTFHVGAQ

SEQ ID NO: 667 - protein, 11 aa, Artificial Sequence
  Synthesized
AQFQTPHVGAQ

SEQ ID NO: 668 - protein, 11 aa, Artificial Sequence
  Synthesized
AQFQTRHVGAQ

SEQ ID NO: 669 - protein, 11 aa, Artificial Sequence
  Synthesized
AQFRESSAMAQ

SEQ ID NO: 670 - protein, 11 aa, Artificial Sequence
  Synthesized
AQFRLKSSDAQ

SEQ ID NO: 671 - protein, 11 aa, Artificial Sequence
  Synthesized
AQFRLPQPNAQ

SEQ ID NO: 672 - protein, 11 aa, Artificial Sequence
  Synthesized
AQFRNNVTQAQ

SEQ ID NO: 673 - protein, 11 aa, Artificial Sequence
  Synthesized
AQFRNVMTEAQ

SEQ ID NO: 674 - protein, 11 aa, Artificial Sequence
  Synthesized
AQFRTESFMAQ

SEQ ID NO: 675 - protein, 11 aa, Artificial Sequence
  Synthesized
AQFRYYSAMAQ

SEQ ID NO: 676 - protein, 11 aa, Artificial Sequence
  Synthesized
AQFSAGLHGAQ

SEQ ID NO: 677 - protein, 11 aa, Artificial Sequence
  Synthesized
AQFSFRSAMAQ

SEQ ID NO: 678 - protein, 11 aa, Artificial Sequence
  Synthesized
AQFSKAAGQAQ

SEQ ID NO: 679 - protein, 11 aa, Artificial Sequence
  Synthesized
AQFSKVLPNAQ

SEQ ID NO: 680 - protein, 11 aa, Artificial Sequence
  Synthesized
AQFSLLSPEAQ

SEQ ID NO: 681 - protein, 11 aa, Artificial Sequence
  Synthesized
AQFSLPRDYAQ

SEQ ID NO: 682 - protein, 11 aa, Artificial Sequence
  Synthesized
AQFSRKSDDAQ

SEQ ID NO: 683 - protein, 11 aa, Artificial Sequence
  Synthesized
AQFSSNTSQAQ

SEQ ID NO: 684 - protein, 11 aa, Artificial Sequence
  Synthesized
AQFSTATRGAQ

SEQ ID NO: 685 - protein, 11 aa, Artificial Sequence
  Synthesized
AQFSTKNSQAQ

SEQ ID NO: 686 - protein, 11 aa, Artificial Sequence
  Synthesized
AQFSTNKSNAQ

SEQ ID NO: 687 - protein, 11 aa, Artificial Sequence
  Synthesized
AQFSTSNIRAQ

SEQ ID NO: 688 - protein, 11 aa, Artificial Sequence
  Synthesized
AQFSTTRSNAQ

SEQ ID NO: 689 - protein, 11 aa, Artificial Sequence
  Synthesized
AQFTDPSSRAQ

SEQ ID NO: 690 - protein, 11 aa, Artificial Sequence
  Synthesized
AQFTRGLNGAQ

SEQ ID NO: 691 - protein, 11 aa, Artificial Sequence
  Synthesized
AQFVAVPSDAQ

SEQ ID NO: 692 - protein, 11 aa, Artificial Sequence
  Synthesized
AQFVKQVGTAQ

SEQ ID NO: 693 - protein, 11 aa, Artificial Sequence
  Synthesized
AQFYEKSTSAQ

SEQ ID NO: 694 - protein, 11 aa, Artificial Sequence
  Synthesized
AQFYGISFMAQ

SEQ ID NO: 695 - protein, 11 aa, Artificial Sequence
  Synthesized
AQFYLPRTKAQ

SEQ ID NO: 696 - protein, 11 aa, Artificial Sequence
  Synthesized
AQFYPKSFMAQ

SEQ ID NO: 697 - protein, 11 aa, Artificial Sequence
  Synthesized
AQGAATEVQAQ

SEQ ID NO: 698 - protein, 11 aa, Artificial Sequence
  Synthesized
AQGAEPSFMAQ

SEQ ID NO: 699 - protein, 11 aa, Artificial Sequence
  Synthesized
AQGAFASSPAQ

SEQ ID NO: 700 - protein, 11 aa, Artificial Sequence
  Synthesized
AQGAGRALNAQ

SEQ ID NO: 701 - protein, 11 aa, Artificial Sequence
  Synthesized
AQGAGSLSSAQ

SEQ ID NO: 702 - protein, 11 aa, Artificial Sequence
  Synthesized
AQGAHTGIKAQ

SEQ ID NO: 703 - protein, 11 aa, Artificial Sequence
  Synthesized
AQGAIHLRDAQ

SEQ ID NO: 704 - protein, 11 aa, Artificial Sequence
  Synthesized
AQGAIHSAMAQ

SEQ ID NO: 705 - protein, 11 aa, Artificial Sequence
  Synthesized
AQGAKSPANAQ

SEQ ID NO: 706 - protein, 11 aa, Artificial Sequence
  Synthesized
AQGAKSPNNAQ

SEQ ID NO: 707 - protein, 11 aa, Artificial Sequence
  Synthesized
AQGALETDRAQ

SEQ ID NO: 708 - protein, 11 aa, Artificial Sequence
  Synthesized
AQGALPRMPAQ

SEQ ID NO: 709 - protein, 11 aa, Artificial Sequence
  Synthesized
AQGANSMLSAQ

SEQ ID NO: 710 - protein, 11 aa, Artificial Sequence
  Synthesized
AQGARPSFMAQ

SEQ ID NO: 711 - protein, 11 aa, Artificial Sequence
  Synthesized
AQGATTNRIAQ

SEQ ID NO: 712 - protein, 11 aa, Artificial Sequence
  Synthesized
AQGAVLNQIAQ

SEQ ID NO: 713 - protein, 11 aa, Artificial Sequence
  Synthesized
AQGAYPSFMAQ

SEQ ID NO: 714 - protein, 11 aa, Artificial Sequence
  Synthesized
AQGDFRSKDAQ

SEQ ID NO: 715 - protein, 11 aa, Artificial Sequence
  Synthesized
AQGDLANRKAQ

SEQ ID NO: 716 - protein, 11 aa, Artificial Sequence
  Synthesized
AQGDLPRGYAQ

SEQ ID NO: 717 - protein, 11 aa, Artificial Sequence
  Synthesized
AQGDQFNSVAQ

SEQ ID NO: 718 - protein, 11 aa, Artificial Sequence
  Synthesized
AQGDRLSANAQ

SEQ ID NO: 719 - protein, 11 aa, Artificial Sequence
  Synthesized
AQGEAKQKWAQ

SEQ ID NO: 720 - protein, 11 aa, Artificial Sequence
  Synthesized
AQGEHLLTFAQ

SEQ ID NO: 721 - protein, 11 aa, Artificial Sequence
  Synthesized
AQGEKKLMTAQ

SEQ ID NO: 722 - protein, 11 aa, Artificial Sequence
  Synthesized
AQGELPDKGAQ

SEQ ID NO: 723 - protein, 11 aa, Artificial Sequence
  Synthesized
AQGELPPNMAQ

SEQ ID NO: 724 - protein, 11 aa, Artificial Sequence
  Synthesized
AQGERSVILAQ

SEQ ID NO: 725 - protein, 11 aa, Artificial Sequence
  Synthesized
AQGETSANLAQ

SEQ ID NO: 726 - protein, 11 aa, Artificial Sequence
  Synthesized
AQGEVSHPWAQ

SEQ ID NO: 727 - protein, 11 aa, Artificial Sequence
  Synthesized
AQGFANFNSAQ

SEQ ID NO: 728 - protein, 11 aa, Artificial Sequence
  Synthesized
AQGFHVSFMAQ

SEQ ID NO: 729 - protein, 11 aa, Artificial Sequence
  Synthesized
AQGFKTVVNAQ

SEQ ID NO: 730 - protein, 11 aa, Artificial Sequence
  Synthesized
AQGFLPRFPAQ

SEQ ID NO: 731 - protein, 11 aa, Artificial Sequence
  Synthesized
AQGFLPRHAAQ

SEQ ID NO: 732 - protein, 11 aa, Artificial Sequence
  Synthesized
AQGFLPRNTAQ

SEQ ID NO: 733 - protein, 11 aa, Artificial Sequence
  Synthesized
AQGFNTKSAAQ

SEQ ID NO: 734 - protein, 11 aa, Artificial Sequence
  Synthesized
AQGFSRDSTAQ

SEQ ID NO: 735 - protein, 11 aa, Artificial Sequence
  Synthesized
AQGGGVRDRAQ

SEQ ID NO: 736 - protein, 11 aa, Artificial Sequence
  Synthesized
AQGGIERSRAQ

SEQ ID NO: 737 - protein, 11 aa, Artificial Sequence
  Synthesized
AQGGKPQQVAQ

SEQ ID NO: 738 - protein, 11 aa, Artificial Sequence
  Synthesized
AQGGLPGKQAQ

SEQ ID NO: 739 - protein, 11 aa, Artificial Sequence
  Synthesized
AQGGLPRALAQ

SEQ ID NO: 740 - protein, 11 aa, Artificial Sequence
  Synthesized
AQGGLPRIKAQ

SEQ ID NO: 741 - protein, 11 aa, Artificial Sequence
  Synthesized
AQGGLPRKSAQ

SEQ ID NO: 742 - protein, 11 aa, Artificial Sequence
  Synthesized
AQGGLPRQKAQ

SEQ ID NO: 743 - protein, 11 aa, Artificial Sequence
  Synthesized
AQGGLPRTYAQ

SEQ ID NO: 744 - protein, 11 aa, Artificial Sequence
  Synthesized
AQGGLPYHSAQ

SEQ ID NO: 745 - protein, 11 aa, Artificial Sequence
  Synthesized
AQGGMQNRNAQ

SEQ ID NO: 746 - protein, 11 aa, Artificial Sequence
  Synthesized
AQGGPPSAMAQ

SEQ ID NO: 747 - protein, 11 aa, Artificial Sequence
  Synthesized
AQGGPYPKMAQ

SEQ ID NO: 748 - protein, 11 aa, Artificial Sequence
  Synthesized
AQGGRISLDAQ

SEQ ID NO: 749 - protein, 11 aa, Artificial Sequence
  Synthesized
AQGGSTVIRAQ

SEQ ID NO: 750 - protein, 11 aa, Artificial Sequence
  Synthesized
AQGGTKPSMAQ

SEQ ID NO: 751 - protein, 11 aa, Artificial Sequence
  Synthesized
AQGGYSSAMAQ

SEQ ID NO: 752 - protein, 11 aa, Artificial Sequence
  Synthesized
AQGGYSSSNAQ

SEQ ID NO: 753 - protein, 11 aa, Artificial Sequence
  Synthesized
AQGHAPSFMAQ

SEQ ID NO: 754 - protein, 11 aa, Artificial Sequence
  Synthesized
AQGHFEVSRAQ

SEQ ID NO: 755 - protein, 11 aa, Artificial Sequence
  Synthesized
AQGHGIAPMAQ

SEQ ID NO: 756 - protein, 11 aa, Artificial Sequence
  Synthesized
AQGHGLPTIAQ

SEQ ID NO: 757 - protein, 11 aa, Artificial Sequence
  Synthesized
AQGHHNSAMAQ

SEQ ID NO: 758 - protein, 11 aa, Artificial Sequence
  Synthesized
AQGHKLSFMAQ

SEQ ID NO: 759 - protein, 11 aa, Artificial Sequence
  Synthesized
AQGHKVSDRAQ

SEQ ID NO: 760 - protein, 11 aa, Artificial Sequence
  Synthesized
AQGHLPAPSAQ

SEQ ID NO: 761 - protein, 11 aa, Artificial Sequence
  Synthesized
AQGHLPKLFAQ

SEQ ID NO: 762 - protein, 11 aa, Artificial Sequence
  Synthesized
AQGHLPQGHAQ

SEQ ID NO: 763 - protein, 11 aa, Artificial Sequence
  Synthesized
AQGHLPTGVAQ

SEQ ID NO: 764 - protein, 11 aa, Artificial Sequence
  Synthesized
AQGHSKYSSAQ

SEQ ID NO: 765 - protein, 11 aa, Artificial Sequence
  Synthesized
AQGHSPSNKAQ

SEQ ID NO: 766 - protein, 11 aa, Artificial Sequence
  Synthesized
AQGHSVKLPAQ

SEQ ID NO: 767 - protein, 11 aa, Artificial Sequence
  Synthesized
AQGHVISRDAQ

SEQ ID NO: 768 - protein, 11 aa, Artificial Sequence
  Synthesized
AQGIARSTSAQ

SEQ ID NO: 769 - protein, 11 aa, Artificial Sequence
  Synthesized
AQGIGLGRDAQ

SEQ ID NO: 770 - protein, 11 aa, Artificial Sequence
  Synthesized
AQGIHYSAMAQ

SEQ ID NO: 771 - protein, 11 aa, Artificial Sequence
  Synthesized
AQGIKLPTPAQ

SEQ ID NO: 772 - protein, 11 aa, Artificial Sequence
  Synthesized
AQGILPNRSAQ

SEQ ID NO: 773 - protein, 11 aa, Artificial Sequence
  Synthesized
AQGILPRHRAQ

SEQ ID NO: 774 - protein, 11 aa, Artificial Sequence
  Synthesized
AQGINQSAIAQ

SEQ ID NO: 775 - protein, 11 aa, Artificial Sequence
  Synthesized
AQGIPASAMAQ

SEQ ID NO: 776 - protein, 11 aa, Artificial Sequence
  Synthesized
AQGISAQPRAQ

SEQ ID NO: 777 - protein, 11 aa, Artificial Sequence
  Synthesized
AQGISVNRAAQ

SEQ ID NO: 778 - protein, 11 aa, Artificial Sequence
  Synthesized
AQGIYASAMAQ

SEQ ID NO: 779 - protein, 11 aa, Artificial Sequence
  Synthesized
AQGIYTSFMAQ

SEQ ID NO: 780 - protein, 11 aa, Artificial Sequence
  Synthesized
AQGKGISVSAQ

SEQ ID NO: 781 - protein, 11 aa, Artificial Sequence
  Synthesized
AQGKLKRDMAQ

SEQ ID NO: 782 - protein, 11 aa, Artificial Sequence
  Synthesized
AQGKMTNNNAQ

SEQ ID NO: 783 - protein, 11 aa, Artificial Sequence
  Synthesized
AQGKNQVSSAQ

SEQ ID NO: 784 - protein, 11 aa, Artificial Sequence
  Synthesized
AQGKPEHLRAQ

SEQ ID NO: 785 - protein, 11 aa, Artificial Sequence
  Synthesized
AQGKQMSLSAQ

SEQ ID NO: 786 - protein, 11 aa, Artificial Sequence
  Synthesized
AQGKSAMSPAQ

SEQ ID NO: 787 - protein, 11 aa, Artificial Sequence
  Synthesized
AQGKSLSSHAQ

SEQ ID NO: 788 - protein, 11 aa, Artificial Sequence
  Synthesized
AQGKTANTLAQ

SEQ ID NO: 789 - protein, 11 aa, Artificial Sequence
  Synthesized
AQGKTNLLQAQ

SEQ ID NO: 790 - protein, 11 aa, Artificial Sequence
  Synthesized
AQGKTYSFMAQ

SEQ ID NO: 791 - protein, 11 aa, Artificial Sequence
  Synthesized
AQGKYGSAMAQ

SEQ ID NO: 792 - protein, 11 aa, Artificial Sequence
  Synthesized
AQGLGKLSEAQ

SEQ ID NO: 793 - protein, 11 aa, Artificial Sequence
  Synthesized
AQGLGRTSSAQ

SEQ ID NO: 794 - protein, 11 aa, Artificial Sequence
  Synthesized
AQGLIGNKSAQ

SEQ ID NO: 795 - protein, 11 aa, Artificial Sequence
  Synthesized
AQGLKGSAMAQ

SEQ ID NO: 796 - protein, 11 aa, Artificial Sequence
  Synthesized
AQGLKTMTIAQ

SEQ ID NO: 797 - protein, 11 aa, Artificial Sequence
  Synthesized
AQGLLLAPHAQ

SEQ ID NO: 798 - protein, 11 aa, Artificial Sequence
  Synthesized
AQGLLPVMGAQ

SEQ ID NO: 799 - protein, 11 aa, Artificial Sequence
  Synthesized
AQGLLTTQGAQ

SEQ ID NO: 800 - protein, 11 aa, Artificial Sequence
  Synthesized
AQGLMSPAAAQ

SEQ ID NO: 801 - protein, 11 aa, Artificial Sequence
  Synthesized
AQGLSGLRQAQ

SEQ ID NO: 802 - protein, 11 aa, Artificial Sequence
  Synthesized
AQGLSLNPQAQ

SEQ ID NO: 803 - protein, 11 aa, Artificial Sequence
  Synthesized
AQGLSMSSGAQ

SEQ ID NO: 804 - protein, 11 aa, Artificial Sequence
  Synthesized
AQGLSNYQSAQ

SEQ ID NO: 805 - protein, 11 aa, Artificial Sequence
  Synthesized
AQGLSSTRNAQ

SEQ ID NO: 806 - protein, 11 aa, Artificial Sequence
  Synthesized
AQGLTRQAQAQ

SEQ ID NO: 807 - protein, 11 aa, Artificial Sequence
  Synthesized
AQGLVQAPAAQ

SEQ ID NO: 808 - protein, 11 aa, Artificial Sequence
  Synthesized
AQGLYNRPMAQ

SEQ ID NO: 809 - protein, 11 aa, Artificial Sequence
  Synthesized
AQGMGGSFMAQ

SEQ ID NO: 810 - protein, 11 aa, Artificial Sequence
  Synthesized
AQGMHGSELAQ

SEQ ID NO: 811 - protein, 11 aa, Artificial Sequence
  Synthesized
AQGMKSSSLAQ

SEQ ID NO: 812 - protein, 11 aa, Artificial Sequence
  Synthesized
AQGMLPPPHAQ

SEQ ID NO: 813 - protein, 11 aa, Artificial Sequence
  Synthesized
AQGMLPRIRAQ

SEQ ID NO: 814 - protein, 11 aa, Artificial Sequence
  Synthesized
AQGMLPRRMAQ

SEQ ID NO: 815 - protein, 11 aa, Artificial Sequence
  Synthesized
AQGMNRSVQAQ

SEQ ID NO: 816 - protein, 11 aa, Artificial Sequence
  Synthesized
AQGMNTSLIAQ

SEQ ID NO: 817 - protein, 11 aa, Artificial Sequence
  Synthesized
AQGMPRSPNAQ

SEQ ID NO: 818 - protein, 11 aa, Artificial Sequence
  Synthesized
AQGNAVARNAQ

SEQ ID NO: 819 - protein, 11 aa, Artificial Sequence
  Synthesized
AQGNAVKDHAQ

SEQ ID NO: 820 - protein, 11 aa, Artificial Sequence
  Synthesized
AQGNDVRTRAQ

SEQ ID NO: 821 - protein, 11 aa, Artificial Sequence
  Synthesized
AQGNFTRHNAQ

SEQ ID NO: 822 - protein, 11 aa, Artificial Sequence
  Synthesized
AQGNFTRIYAQ

SEQ ID NO: 823 - protein, 11 aa, Artificial Sequence
  Synthesized
AQGNFTRKGAQ

SEQ ID NO: 824 - protein, 11 aa, Artificial Sequence
  Synthesized
AQGNGTRAQAQ

SEQ ID NO: 825 - protein, 11 aa, Artificial Sequence
  Synthesized
AQGNGTRFHAQ

SEQ ID NO: 826 - protein, 11 aa, Artificial Sequence
  Synthesized
AQGNGTRTKAQ

SEQ ID NO: 827 - protein, 11 aa, Artificial Sequence
  Synthesized
AQGNHTRHAAQ

SEQ ID NO: 828 - protein, 11 aa, Artificial Sequence
  Synthesized
AQGNHTRHRAQ

SEQ ID NO: 829 - protein, 11 aa, Artificial Sequence
  Synthesized
AQGNHTRPPAQ

SEQ ID NO: 830 - protein, 11 aa, Artificial Sequence
  Synthesized
AQGNHTRRNAQ

SEQ ID NO: 831 - protein, 11 aa, Artificial Sequence
  Synthesized
AQGNHVRLAAQ

SEQ ID NO: 832 - protein, 11 aa, Artificial Sequence
  Synthesized
AQGNKTRGEAQ

SEQ ID NO: 833 - protein, 11 aa, Artificial Sequence
  Synthesized
AQGNKTRGRAQ

SEQ ID NO: 834 - protein, 11 aa, Artificial Sequence
  Synthesized
AQGNLTKTVAQ

SEQ ID NO: 835 - protein, 11 aa, Artificial Sequence
  Synthesized
AQGNMTRHGAQ

SEQ ID NO: 836 - protein, 11 aa, Artificial Sequence
  Synthesized
AQGNMTRYGAQ

SEQ ID NO: 837 - protein, 11 aa, Artificial Sequence
  Synthesized
AQGNNTFGYAQ

SEQ ID NO: 838 - protein, 11 aa, Artificial Sequence
  Synthesized
AQGNNTFHYAQ

SEQ ID NO: 839 - protein, 11 aa, Artificial Sequence
  Synthesized
AQGNNTGEDAQ

SEQ ID NO: 840 - protein, 11 aa, Artificial Sequence
  Synthesized
AQGNNTGHHAQ

SEQ ID NO: 841 - protein, 11 aa, Artificial Sequence
  Synthesized
AQGNNTHPFAQ

SEQ ID NO: 842 - protein, 11 aa, Artificial Sequence
  Synthesized
AQGNNTIGFAQ

SEQ ID NO: 843 - protein, 11 aa, Artificial Sequence
  Synthesized
AQGNNTKRHAQ

SEQ ID NO: 844 - protein, 11 aa, Artificial Sequence
  Synthesized
AQGNNTLYYAQ

SEQ ID NO: 845 - protein, 11 aa, Artificial Sequence
  Synthesized
AQGNNTPFDAQ

SEQ ID NO: 846 - protein, 11 aa, Artificial Sequence
  Synthesized
AQGNNTYGGAQ

SEQ ID NO: 847 - protein, 11 aa, Artificial Sequence
  Synthesized
AQGNNTYQRAQ

SEQ ID NO: 848 - protein, 11 aa, Artificial Sequence
  Synthesized
AQGNPAINSAQ

SEQ ID NO: 849 - protein, 11 aa, Artificial Sequence
  Synthesized
AQGNPAKLSAQ

SEQ ID NO: 850 - protein, 11 aa, Artificial Sequence
  Synthesized
AQGNPEMISAQ

SEQ ID NO: 851 - protein, 11 aa, Artificial Sequence
  Synthesized
AQGNPFTDSAQ

SEQ ID NO: 852 - protein, 11 aa, Artificial Sequence
  Synthesized
AQGNPFTTSAQ

SEQ ID NO: 853 - protein, 11 aa, Artificial Sequence
  Synthesized
AQGNPKKGSAQ

SEQ ID NO: 854 - protein, 11 aa, Artificial Sequence
  Synthesized
AQGNPLRASAQ

SEQ ID NO: 855 - protein, 11 aa, Artificial Sequence
  Synthesized
AQGNPPIGSAQ

SEQ ID NO: 856 - protein, 11 aa, Artificial Sequence
  Synthesized
AQGNPPPISAQ

SEQ ID NO: 857 - protein, 11 aa, Artificial Sequence
  Synthesized
AQGNPRMPSAQ

SEQ ID NO: 858 - protein, 11 aa, Artificial Sequence
  Synthesized
AQGNPTRKTAQ

SEQ ID NO: 859 - protein, 11 aa, Artificial Sequence
  Synthesized
AQGNPVLRSAQ

SEQ ID NO: 860 - protein, 11 aa, Artificial Sequence
  Synthesized
AQGNPVNRSAQ

SEQ ID NO: 861 - protein, 11 aa, Artificial Sequence
  Synthesized
AQGNPVPRSAQ

SEQ ID NO: 862 - protein, 11 aa, Artificial Sequence
  Synthesized
AQGNPVVRSAQ

SEQ ID NO: 863 - protein, 11 aa, Artificial Sequence
  Synthesized
AQGNPVYRSAQ

SEQ ID NO: 864 - protein, 11 aa, Artificial Sequence
  Synthesized
AQGNPYLSSAQ

SEQ ID NO: 865 - protein, 11 aa, Artificial Sequence
  Synthesized
AQGNQKVGLAQ

SEQ ID NO: 866 - protein, 11 aa, Artificial Sequence
  Synthesized
AQGNQLKNTAQ

SEQ ID NO: 867 - protein, 11 aa, Artificial Sequence
  Synthesized
AQGNQTRPYAQ

SEQ ID NO: 868 - protein, 11 aa, Artificial Sequence
  Synthesized
AQGNRTRHHAQ

SEQ ID NO: 869 - protein, 11 aa, Artificial Sequence
  Synthesized
AQGNRTRNFAQ

SEQ ID NO: 870 - protein, 11 aa, Artificial Sequence
  Synthesized
AQGNRTRYTAQ

SEQ ID NO: 871 - protein, 11 aa, Artificial Sequence
  Synthesized
AQGNSSKNLAQ

SEQ ID NO: 872 - protein, 11 aa, Artificial Sequence
  Synthesized
AQGNSSNPRAQ

SEQ ID NO: 873 - protein, 11 aa, Artificial Sequence
  Synthesized
AQGNSVKDSAQ

SEQ ID NO: 874 - protein, 11 aa, Artificial Sequence
  Synthesized
AQGNSVRISAQ

SEQ ID NO: 875 - protein, 11 aa, Artificial Sequence
  Synthesized
AQGNTTLRLAQ

SEQ ID NO: 876 - protein, 11 aa, Artificial Sequence
  Synthesized
AQGNTTLRSAQ

SEQ ID NO: 877 - protein, 11 aa, Artificial Sequence
  Synthesized
AQGNTTRLVAQ

SEQ ID NO: 878 - protein, 11 aa, Artificial Sequence
  Synthesized
AQGNTTRPIAQ

SEQ ID NO: 879 - protein, 11 aa, Artificial Sequence
  Synthesized
AQGNTTRVTAQ

SEQ ID NO: 880 - protein, 11 aa, Artificial Sequence
  Synthesized
AQGNTVAKVAQ

SEQ ID NO: 881 - protein, 11 aa, Artificial Sequence
  Synthesized
AQGNVTRIRAQ

SEQ ID NO: 882 - protein, 11 aa, Artificial Sequence
  Synthesized
AQGNVTRNQAQ

SEQ ID NO: 883 - protein, 11 aa, Artificial Sequence
  Synthesized
AQGNYTRHMAQ

SEQ ID NO: 884 - protein, 11 aa, Artificial Sequence
  Synthesized
AQGNYTRTPAQ

SEQ ID NO: 885 - protein, 11 aa, Artificial Sequence
  Synthesized
AQGPAKSAMAQ

SEQ ID NO: 886 - protein, 11 aa, Artificial Sequence
  Synthesized
AQGPDRMKIAQ

SEQ ID NO: 887 - protein, 11 aa, Artificial Sequence
  Synthesized
AQGPGDQLNAQ

SEQ ID NO: 888 - protein, 11 aa, Artificial Sequence
  Synthesized
AQGPHTSFMAQ

SEQ ID NO: 889 - protein, 11 aa, Artificial Sequence
  Synthesized
AQGPLPDLRAQ

SEQ ID NO: 890 - protein, 11 aa, Artificial Sequence
  Synthesized
AQGPLPRHFAQ

SEQ ID NO: 891 - protein, 11 aa, Artificial Sequence
  Synthesized
AQGPLSRQPAQ

SEQ ID NO: 892 - protein, 11 aa, Artificial Sequence
  Synthesized
AQGPQLSAMAQ

SEQ ID NO: 893 - protein, 11 aa, Artificial Sequence
  Synthesized
AQGPRPGNIAQ

SEQ ID NO: 894 - protein, 11 aa, Artificial Sequence
  Synthesized
AQGPSTHDLAQ

SEQ ID NO: 895 - protein, 11 aa, Artificial Sequence
  Synthesized
AQGPVPSFMAQ

SEQ ID NO: 896 - protein, 11 aa, Artificial Sequence
  Synthesized
AQGPVQRNVAQ

SEQ ID NO: 897 - protein, 11 aa, Artificial Sequence
  Synthesized
AQGPVQVPTAQ

SEQ ID NO: 898 - protein, 11 aa, Artificial Sequence
  Synthesized
AQGPVSSFAAQ

SEQ ID NO: 899 - protein, 11 aa, Artificial Sequence
  Synthesized
AQGQASTSLAQ

SEQ ID NO: 900 - protein, 11 aa, Artificial Sequence
  Synthesized
AQGQFSSFMAQ

SEQ ID NO: 901 - protein, 11 aa, Artificial Sequence
  Synthesized
AQGQGRNMTAQ

SEQ ID NO: 902 - protein, 11 aa, Artificial Sequence
  Synthesized
AQGQMKQTFAQ

SEQ ID NO: 903 - protein, 11 aa, Artificial Sequence
  Synthesized
AQGQMSPMLAQ

SEQ ID NO: 904 - protein, 11 aa, Artificial Sequence
  Synthesized
AQGQPIVNNAQ

SEQ ID NO: 905 - protein, 11 aa, Artificial Sequence
  Synthesized
AQGQRATLTAQ

SEQ ID NO: 906 - protein, 11 aa, Artificial Sequence
  Synthesized
AQGQRMLASAQ

SEQ ID NO: 907 - protein, 11 aa, Artificial Sequence
  Synthesized
AQGQRPQVQAQ

SEQ ID NO: 908 - protein, 11 aa, Artificial Sequence
  Synthesized
AQGQRSSLSAQ

SEQ ID NO: 909 - protein, 11 aa, Artificial Sequence
  Synthesized
AQGQSDVLKAQ

SEQ ID NO: 910 - protein, 11 aa, Artificial Sequence
  Synthesized
AQGQVTNRTAQ

SEQ ID NO: 911 - protein, 11 aa, Artificial Sequence
  Synthesized
AQGRALTATAQ

SEQ ID NO: 912 - protein, 11 aa, Artificial Sequence
  Synthesized
AQGRASMTSAQ

SEQ ID NO: 913 - protein, 11 aa, Artificial Sequence
  Synthesized
AQGRAVVTGAQ

SEQ ID NO: 914 - protein, 11 aa, Artificial Sequence
  Synthesized
AQGRDHSVQAQ

SEQ ID NO: 915 - protein, 11 aa, Artificial Sequence
  Synthesized
AQGRGMSSQAQ

SEQ ID NO: 916 - protein, 11 aa, Artificial Sequence
  Synthesized
AQGRGSLNQAQ

SEQ ID NO: 917 - protein, 11 aa, Artificial Sequence
  Synthesized
AQGRGVHTEAQ

SEQ ID NO: 918 - protein, 11 aa, Artificial Sequence
  Synthesized
AQGRHMEQLAQ

SEQ ID NO: 919 - protein, 11 aa, Artificial Sequence
  Synthesized
AQGRLHIGEAQ

SEQ ID NO: 920 - protein, 11 aa, Artificial Sequence
  Synthesized
AQGRLNVTTAQ

SEQ ID NO: 921 - protein, 11 aa, Artificial Sequence
  Synthesized
AQGRLPNFPAQ

SEQ ID NO: 922 - protein, 11 aa, Artificial Sequence
  Synthesized
AQGRLPSAMAQ

SEQ ID NO: 923 - protein, 11 aa, Artificial Sequence
  Synthesized
AQGRMSSLAAQ

SEQ ID NO: 924 - protein, 11 aa, Artificial Sequence
  Synthesized
AQGRNGLMVAQ

SEQ ID NO: 925 - protein, 11 aa, Artificial Sequence
  Synthesized
AQGRPGAQLAQ

SEQ ID NO: 926 - protein, 11 aa, Artificial Sequence
  Synthesized
AQGRQAYASAQ

SEQ ID NO: 927 - protein, 11 aa, Artificial Sequence
  Synthesized
AQGRQLLPSAQ

SEQ ID NO: 928 - protein, 11 aa, Artificial Sequence
  Synthesized
AQGRSETYLAQ

SEQ ID NO: 929 - protein, 11 aa, Artificial Sequence
  Synthesized
AQGRSFSFMAQ

SEQ ID NO: 930 - protein, 11 aa, Artificial Sequence
  Synthesized
AQGRSGTATAQ

SEQ ID NO: 931 - protein, 11 aa, Artificial Sequence
  Synthesized
AQGRSMANQAQ

SEQ ID NO: 932 - protein, 11 aa, Artificial Sequence
  Synthesized
AQGRSQAPQAQ

SEQ ID NO: 933 - protein, 11 aa, Artificial Sequence
  Synthesized
AQGRSSQGEAQ

SEQ ID NO: 934 - protein, 11 aa, Artificial Sequence
  Synthesized
AQGRSSVLPAQ

SEQ ID NO: 935 - protein, 11 aa, Artificial Sequence
  Synthesized
AQGRSTLPDAQ

SEQ ID NO: 936 - protein, 11 aa, Artificial Sequence
  Synthesized
AQGRTGMSPAQ

SEQ ID NO: 937 - protein, 11 aa, Artificial Sequence
  Synthesized
AQGRTGVGVAQ

SEQ ID NO: 938 - protein, 11 aa, Artificial Sequence
  Synthesized
AQGRTSIREAQ

SEQ ID NO: 939 - protein, 11 aa, Artificial Sequence
  Synthesized
AQGRVDTMMAQ

SEQ ID NO: 940 - protein, 11 aa, Artificial Sequence
  Synthesized
AQGRVPAANAQ

SEQ ID NO: 941 - protein, 11 aa, Artificial Sequence
  Synthesized
AQGSASVRNAQ

SEQ ID NO: 942 - protein, 11 aa, Artificial Sequence
  Synthesized
AQGSDPARFAQ

SEQ ID NO: 943 - protein, 11 aa, Artificial Sequence
  Synthesized
AQGSEIRTVAQ

SEQ ID NO: 944 - protein, 11 aa, Artificial Sequence
  Synthesized
AQGSGLRAYAQ

SEQ ID NO: 945 - protein, 11 aa, Artificial Sequence
  Synthesized
AQGSGRNVGAQ

SEQ ID NO: 946 - protein, 11 aa, Artificial Sequence
  Synthesized
AQGSKHLPQAQ

SEQ ID NO: 947 - protein, 11 aa, Artificial Sequence
  Synthesized
AQGSKSDLQAQ

SEQ ID NO: 948 - protein, 11 aa, Artificial Sequence
  Synthesized
AQGSLLATKAQ

SEQ ID NO: 949 - protein, 11 aa, Artificial Sequence
  Synthesized
AQGSLPLDSAQ

SEQ ID NO: 950 - protein, 11 aa, Artificial Sequence
  Synthesized
AQGSLPRHKAQ

SEQ ID NO: 951 - protein, 11 aa, Artificial Sequence
  Synthesized
AQGSLPVSDAQ

SEQ ID NO: 952 - protein, 11 aa, Artificial Sequence
  Synthesized
AQGSMKTFQAQ

SEQ ID NO: 953 - protein, 11 aa, Artificial Sequence
  Synthesized
AQGSNRVQHAQ

SEQ ID NO: 954 - protein, 11 aa, Artificial Sequence
  Synthesized
AQGSNVEELAQ

SEQ ID NO: 955 - protein, 11 aa, Artificial Sequence
  Synthesized
AQGSQRTPEAQ

SEQ ID NO: 956 - protein, 11 aa, Artificial Sequence
  Synthesized
AQGSRGTSPAQ

SEQ ID NO: 957 - protein, 11 aa, Artificial Sequence
  Synthesized
AQGSRISSTAQ

SEQ ID NO: 958 - protein, 11 aa, Artificial Sequence
  Synthesized
AQGSRSGTLAQ

SEQ ID NO: 959 - protein, 11 aa, Artificial Sequence
  Synthesized
AQGSRSVLGAQ

SEQ ID NO: 960 - protein, 11 aa, Artificial Sequence
  Synthesized
AQGSSMRSSAQ

SEQ ID NO: 961 - protein, 11 aa, Artificial Sequence
  Synthesized
AQGSSVLKSAQ

SEQ ID NO: 962 - protein, 11 aa, Artificial Sequence
  Synthesized
AQGSTGRDKAQ

SEQ ID NO: 963 - protein, 11 aa, Artificial Sequence
  Synthesized
AQGSTGRVLAQ

SEQ ID NO: 964 - protein, 11 aa, Artificial Sequence
  Synthesized
AQGSTPITRAQ

SEQ ID NO: 965 - protein, 11 aa, Artificial Sequence
  Synthesized
AQGSTSRANAQ

SEQ ID NO: 966 - protein, 11 aa, Artificial Sequence
  Synthesized
AQGSVYRDSAQ

SEQ ID NO: 967 - protein, 11 aa, Artificial Sequence
  Synthesized
AQGSYASPLAQ

SEQ ID NO: 968 - protein, 11 aa, Artificial Sequence
  Synthesized
AQGSYGGQNAQ

SEQ ID NO: 969 - protein, 11 aa, Artificial Sequence
  Synthesized
AQGSYSHSEAQ

SEQ ID NO: 970 - protein, 11 aa, Artificial Sequence
  Synthesized
AQGTGARPTAQ

SEQ ID NO: 971 - protein, 11 aa, Artificial Sequence
  Synthesized
AQGTKQSLSAQ

SEQ ID NO: 972 - protein, 11 aa, Artificial Sequence
  Synthesized
AQGTLGYAAAQ

SEQ ID NO: 973 - protein, 11 aa, Artificial Sequence
  Synthesized
AQGTLPRPYAQ

SEQ ID NO: 974 - protein, 11 aa, Artificial Sequence
  Synthesized
AQGTMGLANAQ

SEQ ID NO: 975 - protein, 11 aa, Artificial Sequence
  Synthesized
AQGTNANRTAQ

SEQ ID NO: 976 - protein, 11 aa, Artificial Sequence
  Synthesized
AQGTRGQMVAQ

SEQ ID NO: 977 - protein, 11 aa, Artificial Sequence
  Synthesized
AQGTRPVAPAQ

SEQ ID NO: 978 - protein, 11 aa, Artificial Sequence
  Synthesized
AQGTRSTGGAQ

SEQ ID NO: 979 - protein, 11 aa, Artificial Sequence
  Synthesized
AQGTSPMRPAQ

SEQ ID NO: 980 - protein, 11 aa, Artificial Sequence
  Synthesized
AQGTTGKSTAQ

SEQ ID NO: 981 - protein, 11 aa, Artificial Sequence
  Synthesized
AQGTYKSFMAQ

SEQ ID NO: 982 - protein, 11 aa, Artificial Sequence
  Synthesized
AQGVAGVRIAQ

SEQ ID NO: 983 - protein, 11 aa, Artificial Sequence
  Synthesized
AQGVARQNTAQ

SEQ ID NO: 984 - protein, 11 aa, Artificial Sequence
  Synthesized
AQGVESLTPAQ

SEQ ID NO: 985 - protein, 11 aa, Artificial Sequence
  Synthesized
AQGVGNTTRAQ

SEQ ID NO: 986 - protein, 11 aa, Artificial Sequence
  Synthesized
AQGVGTLSSAQ

SEQ ID NO: 987 - protein, 11 aa, Artificial Sequence
  Synthesized
AQGVHDNSQAQ

SEQ ID NO: 988 - protein, 11 aa, Artificial Sequence
  Synthesized
AQGVKVSQLAQ

SEQ ID NO: 989 - protein, 11 aa, Artificial Sequence
  Synthesized
AQGVLAHPKAQ

SEQ ID NO: 990 - protein, 11 aa, Artificial Sequence
  Synthesized
AQGVLNRESAQ

SEQ ID NO: 991 - protein, 11 aa, Artificial Sequence
  Synthesized
AQGVLPRTMAQ

SEQ ID NO: 992 - protein, 11 aa, Artificial Sequence
  Synthesized
AQGVLQLTAAQ

SEQ ID NO: 993 - protein, 11 aa, Artificial Sequence
  Synthesized
AQGVLQLTEAQ

SEQ ID NO: 994 - protein, 11 aa, Artificial Sequence
  Synthesized
AQGVLSLKDAQ

SEQ ID NO: 995 - protein, 11 aa, Artificial Sequence
  Synthesized
AQGVMRSFMAQ

SEQ ID NO: 996 - protein, 11 aa, Artificial Sequence
  Synthesized
AQGVPHQTRAQ

SEQ ID NO: 997 - protein, 11 aa, Artificial Sequence
  Synthesized
AQGVRGGTSAQ

SEQ ID NO: 998 - protein, 11 aa, Artificial Sequence
  Synthesized
AQGVRNTNSAQ

SEQ ID NO: 999 - protein, 11 aa, Artificial Sequence
  Synthesized
AQGVSDRASAQ

SEQ ID NO: 1000 - protein, 11 aa, Artificial Sequence
  Synthesized
AQGVSGTSSAQ

SEQ ID NO: 1001 - protein, 11 aa, Artificial Sequence
  Synthesized
AQGVTDKKTAQ

SEQ ID NO: 1002 - protein, 11 aa, Artificial Sequence
  Synthesized
AQGVVISPSAQ

SEQ ID NO: 1003 - protein, 11 aa, Artificial Sequence
  Synthesized
AQGYGMSAMAQ

SEQ ID NO: 1004 - protein, 11 aa, Artificial Sequence
  Synthesized
AQGYGVHREAQ

SEQ ID NO: 1005 - protein, 11 aa, Artificial Sequence
  Synthesized
AQGYLPFGSAQ

SEQ ID NO: 1006 - protein, 11 aa, Artificial Sequence
  Synthesized
AQGYLPHHKAQ

SEQ ID NO: 1007 - protein, 11 aa, Artificial Sequence
  Synthesized
AQGYLPHHYAQ

SEQ ID NO: 1008 - protein, 11 aa, Artificial Sequence
  Synthesized
AQGYLPRGSAQ

SEQ ID NO: 1009 - protein, 11 aa, Artificial Sequence
  Synthesized
AQGYPFSFMAQ

SEQ ID NO: 1010 - protein, 11 aa, Artificial Sequence
  Synthesized
AQGYSHSSGAQ

SEQ ID NO: 1011 - protein, 11 aa, Artificial Sequence
  Synthesized
AQHADRTYSAQ

SEQ ID NO: 1012 - protein, 11 aa, Artificial Sequence
  Synthesized
AQHADSLKAAQ

SEQ ID NO: 1013 - protein, 11 aa, Artificial Sequence
  Synthesized
AQHAFFSFMAQ

SEQ ID NO: 1014 - protein, 11 aa, Artificial Sequence
  Synthesized
AQHALPRRPAQ

SEQ ID NO: 1015 - protein, 11 aa, Artificial Sequence
  Synthesized
AQHAPDSFMAQ

SEQ ID NO: 1016 - protein, 11 aa, Artificial Sequence
  Synthesized
AQHAQAPMAAQ

SEQ ID NO: 1017 - protein, 11 aa, Artificial Sequence
  Synthesized
AQHAQRSTAAQ

SEQ ID NO: 1018 - protein, 11 aa, Artificial Sequence
  Synthesized
AQHATSSTQAQ

SEQ ID NO: 1019 - protein, 11 aa, Artificial Sequence
  Synthesized
AQHAVTSFMAQ

SEQ ID NO: 1020 - protein, 11 aa, Artificial Sequence
  Synthesized
AQHDKPSFMAQ

SEQ ID NO: 1021 - protein, 11 aa, Artificial Sequence
  Synthesized
AQHDLPHKHAQ

SEQ ID NO: 1022 - protein, 11 aa, Artificial Sequence
  Synthesized
AQHDLPRPKAQ

SEQ ID NO: 1023 - protein, 11 aa, Artificial Sequence
  Synthesized
AQHDLPYEAAQ

SEQ ID NO: 1024 - protein, 11 aa, Artificial Sequence
  Synthesized
AQHDRDYPLAQ

SEQ ID NO: 1025 - protein, 11 aa, Artificial Sequence
  Synthesized
AQHDSKLTYAQ

SEQ ID NO: 1026 - protein, 11 aa, Artificial Sequence
  Synthesized
AQHDSLILSAQ

SEQ ID NO: 1027 - protein, 11 aa, Artificial Sequence
  Synthesized
AQHEHNSAMAQ

SEQ ID NO: 1028 - protein, 11 aa, Artificial Sequence
  Synthesized
AQHELPRTAAQ

SEQ ID NO: 1029 - protein, 11 aa, Artificial Sequence
  Synthesized
AQHEPHSFMAQ

SEQ ID NO: 1030 - protein, 11 aa, Artificial Sequence
  Synthesized
AQHEPTSLLAQ

SEQ ID NO: 1031 - protein, 11 aa, Artificial Sequence
  Synthesized
AQHFGKSFMAQ

SEQ ID NO: 1032 - protein, 11 aa, Artificial Sequence
  Synthesized
AQHFLPFGAAQ

SEQ ID NO: 1033 - protein, 11 aa, Artificial Sequence
  Synthesized
AQHFLPGGRAQ

SEQ ID NO: 1034 - protein, 11 aa, Artificial Sequence
  Synthesized
AQHFLPREKAQ

SEQ ID NO: 1035 - protein, 11 aa, Artificial Sequence
  Synthesized
AQHFPFSFMAQ

SEQ ID NO: 1036 - protein, 11 aa, Artificial Sequence
  Synthesized
AQHFRFSAMAQ

SEQ ID NO: 1037 - protein, 11 aa, Artificial Sequence
  Synthesized
AQHFYISFMAQ

SEQ ID NO: 1038 - protein, 11 aa, Artificial Sequence
  Synthesized
AQHGFSSQAAQ

SEQ ID NO: 1039 - protein, 11 aa, Artificial Sequence
  Synthesized
AQHGHGSFMAQ

SEQ ID NO: 1040 - protein, 11 aa, Artificial Sequence
  Synthesized
AQHGLPEYQAQ

SEQ ID NO: 1041 - protein, 11 aa, Artificial Sequence
  Synthesized
AQHGLPHFMAQ

SEQ ID NO: 1042 - protein, 11 aa, Artificial Sequence
  Synthesized
AQHGLPHHHAQ

SEQ ID NO: 1043 - protein, 11 aa, Artificial Sequence
  Synthesized
AQHGLPRFLAQ

SEQ ID NO: 1044 - protein, 11 aa, Artificial Sequence
  Synthesized
AQHGLPRPHAQ

SEQ ID NO: 1045 - protein, 11 aa, Artificial Sequence
  Synthesized
AQHGLPRPKAQ

SEQ ID NO: 1046 - protein, 11 aa, Artificial Sequence
  Synthesized
AQHGLPRYAAQ

SEQ ID NO: 1047 - protein, 11 aa, Artificial Sequence
  Synthesized
AQHGMKGSLAQ

SEQ ID NO: 1048 - protein, 11 aa, Artificial Sequence
  Synthesized
AQHGPHLPVAQ

SEQ ID NO: 1049 - protein, 11 aa, Artificial Sequence
  Synthesized
AQHGTKTAEAQ

SEQ ID NO: 1050 - protein, 11 aa, Artificial Sequence
  Synthesized
AQHGYKDLTAQ

SEQ ID NO: 1051 - protein, 11 aa, Artificial Sequence
  Synthesized
AQHHEDSAMAQ

SEQ ID NO: 1052 - protein, 11 aa, Artificial Sequence
  Synthesized
AQHHELSAMAQ

SEQ ID NO: 1053 - protein, 11 aa, Artificial Sequence
  Synthesized
AQHHIASAMAQ

SEQ ID NO: 1054 - protein, 11 aa, Artificial Sequence
  Synthesized
AQHHLPFHLAQ

SEQ ID NO: 1055 - protein, 11 aa, Artificial Sequence
  Synthesized
AQHHLPLPNAQ

SEQ ID NO: 1056 - protein, 11 aa, Artificial Sequence
  Synthesized
AQHHLPREFAQ

SEQ ID NO: 1057 - protein, 11 aa, Artificial Sequence
  Synthesized
AQHHLPRFPAQ

SEQ ID NO: 1058 - protein, 11 aa, Artificial Sequence
  Synthesized
AQHHLPRMKAQ

SEQ ID NO: 1059 - protein, 11 aa, Artificial Sequence
  Synthesized
AQHHLPRPFAQ

SEQ ID NO: 1060 - protein, 11 aa, Artificial Sequence
  Synthesized
AQHHLPRRLAQ

SEQ ID NO: 1061 - protein, 11 aa, Artificial Sequence
  Synthesized
AQHHLPRVNAQ

SEQ ID NO: 1062 - protein, 11 aa, Artificial Sequence
  Synthesized
AQHHLPSTMAQ

SEQ ID NO: 1063 - protein, 11 aa, Artificial Sequence
  Synthesized
AQHHPFSAMAQ

SEQ ID NO: 1064 - protein, 11 aa, Artificial Sequence
  Synthesized
AQHHRLSAMAQ

SEQ ID NO: 1065 - protein, 11 aa, Artificial Sequence
  Synthesized
AQHHSQSFMAQ

SEQ ID NO: 1066 - protein, 11 aa, Artificial Sequence
  Synthesized
AQHHTESAMAQ

SEQ ID NO: 1067 - protein, 11 aa, Artificial Sequence
  Synthesized
AQHIFKSAMAQ

SEQ ID NO: 1068 - protein, 11 aa, Artificial Sequence
  Synthesized
AQHIGVDSRAQ

SEQ ID NO: 1069 - protein, 11 aa, Artificial Sequence
  Synthesized
AQHIHPSFMAQ

SEQ ID NO: 1070 - protein, 11 aa, Artificial Sequence
  Synthesized
AQHILPRFTAQ

SEQ ID NO: 1071 - protein, 11 aa, Artificial Sequence
  Synthesized
AQHKIDVTSAQ

SEQ ID NO: 1072 - protein, 11 aa, Artificial Sequence
  Synthesized
AQHKLPFAYAQ

SEQ ID NO: 1073 - protein, 11 aa, Artificial Sequence
  Synthesized
AQHKLPMHEAQ

SEQ ID NO: 1074 - protein, 11 aa, Artificial Sequence
  Synthesized
AQHKLPRPLAQ

SEQ ID NO: 1075 - protein, 11 aa, Artificial Sequence
  Synthesized
AQHKLPRPYAQ

SEQ ID NO: 1076 - protein, 11 aa, Artificial Sequence
  Synthesized
AQHKLPSPHAQ

SEQ ID NO: 1077 - protein, 11 aa, Artificial Sequence
  Synthesized
AQHKLTDRSAQ

SEQ ID NO: 1078 - protein, 11 aa, Artificial Sequence
  Synthesized
AQHKMNSSGAQ

SEQ ID NO: 1079 - protein, 11 aa, Artificial Sequence
  Synthesized
AQHKNLRQDAQ

SEQ ID NO: 1080 - protein, 11 aa, Artificial Sequence
  Synthesized
AQHKSIPGTAQ

SEQ ID NO: 1081 - protein, 11 aa, Artificial Sequence
  Synthesized
AQHKSLLAAAQ

SEQ ID NO: 1082 - protein, 11 aa, Artificial Sequence
  Synthesized
AQHKTASSSAQ

SEQ ID NO: 1083 - protein, 11 aa, Artificial Sequence
  Synthesized
AQHKTKSFMAQ

SEQ ID NO: 1084 - protein, 11 aa, Artificial Sequence
  Synthesized
AQHLARDALAQ

SEQ ID NO: 1085 - protein, 11 aa, Artificial Sequence
  Synthesized
AQHLEKSKTAQ

SEQ ID NO: 1086 - protein, 11 aa, Artificial Sequence
  Synthesized
AQHLGMTEFAQ

SEQ ID NO: 1087 - protein, 11 aa, Artificial Sequence
  Synthesized
AQHLGSSSGAQ

SEQ ID NO: 1088 - protein, 11 aa, Artificial Sequence
  Synthesized
AQHLHKDYAAQ

SEQ ID NO: 1089 - protein, 11 aa, Artificial Sequence
  Synthesized
AQHLKQPSSAQ

SEQ ID NO: 1090 - protein, 11 aa, Artificial Sequence
  Synthesized
AQHLKQTSQAQ

SEQ ID NO: 1091 - protein, 11 aa, Artificial Sequence
  Synthesized
AQHLKSTEDAQ

SEQ ID NO: 1092 - protein, 11 aa, Artificial Sequence
  Synthesized
AQHLLPVRLAQ

SEQ ID NO: 1093 - protein, 11 aa, Artificial Sequence
  Synthesized
AQHLSRAGSAQ

SEQ ID NO: 1094 - protein, 11 aa, Artificial Sequence
  Synthesized
AQHLVQTTSAQ

SEQ ID NO: 1095 - protein, 11 aa, Artificial Sequence
  Synthesized
AQHLYSDQDAQ

SEQ ID NO: 1096 - protein, 11 aa, Artificial Sequence
  Synthesized
AQHMDSNTSAQ

SEQ ID NO: 1097 - protein, 11 aa, Artificial Sequence
  Synthesized
AQHMKVAASAQ

SEQ ID NO: 1098 - protein, 11 aa, Artificial Sequence
  Synthesized
AQHMLPRHHAQ

SEQ ID NO: 1099 - protein, 11 aa, Artificial Sequence
  Synthesized
AQHMPMSAMAQ

SEQ ID NO: 1100 - protein, 11 aa, Artificial Sequence
  Synthesized
AQHNFTRHPAQ

SEQ ID NO: 1101 - protein, 11 aa, Artificial Sequence
  Synthesized
AQHNFTRQEAQ

SEQ ID NO: 1102 - protein, 11 aa, Artificial Sequence
  Synthesized
AQHNFTRRHAQ

SEQ ID NO: 1103 - protein, 11 aa, Artificial Sequence
  Synthesized
AQHNGTRGRAQ

SEQ ID NO: 1104 - protein, 11 aa, Artificial Sequence
  Synthesized
AQHNGTRRSAQ

SEQ ID NO: 1105 - protein, 11 aa, Artificial Sequence
  Synthesized
AQHNHTRMHAQ

SEQ ID NO: 1106 - protein, 11 aa, Artificial Sequence
  Synthesized
AQHNIISFMAQ

SEQ ID NO: 1107 - protein, 11 aa, Artificial Sequence
  Synthesized
AQHNITRGEAQ

SEQ ID NO: 1108 - protein, 11 aa, Artificial Sequence
  Synthesized
AQHNLPRHSAQ

SEQ ID NO: 1109 - protein, 11 aa, Artificial Sequence
  Synthesized
AQHNNTAHHAQ

SEQ ID NO: 1110 - protein, 11 aa, Artificial Sequence
  Synthesized
AQHNNTDNHAQ

SEQ ID NO: 1111 - protein, 11 aa, Artificial Sequence
  Synthesized
AQHNNTEKHAQ

SEQ ID NO: 1112 - protein, 11 aa, Artificial Sequence
  Synthesized
AQHNNTGHRAQ

SEQ ID NO: 1113 - protein, 11 aa, Artificial Sequence
  Synthesized
AQHNNTGKNAQ

SEQ ID NO: 1114 - protein, 11 aa, Artificial Sequence
  Synthesized
AQHNNTGLGAQ

SEQ ID NO: 1115 - protein, 11 aa, Artificial Sequence
  Synthesized
AQHNNTIMQAQ

SEQ ID NO: 1116 - protein, 11 aa, Artificial Sequence
  Synthesized
AQHNNTISMAQ

SEQ ID NO: 1117 - protein, 11 aa, Artificial Sequence
  Synthesized
AQHNNTKHGAQ

SEQ ID NO: 1118 - protein, 11 aa, Artificial Sequence
  Synthesized
AQHNNTMSKAQ

SEQ ID NO: 1119 - protein, 11 aa, Artificial Sequence
  Synthesized
AQHNNTPGHAQ

SEQ ID NO: 1120 - protein, 11 aa, Artificial Sequence
  Synthesized
AQHNNTPKPAQ

SEQ ID NO: 1121 - protein, 11 aa, Artificial Sequence
  Synthesized
AQHNNTPRHAQ

SEQ ID NO: 1122 - protein, 11 aa, Artificial Sequence
  Synthesized
AQHNNTPVQAQ

SEQ ID NO: 1123 - protein, 11 aa, Artificial Sequence
  Synthesized
AQHNNTQLGAQ

SEQ ID NO: 1124 - protein, 11 aa, Artificial Sequence
  Synthesized
AQHNNTRNKAQ

SEQ ID NO: 1125 - protein, 11 aa, Artificial Sequence
  Synthesized
AQHNNTRPPAQ

SEQ ID NO: 1126 - protein, 11 aa, Artificial Sequence
  Synthesized
AQHNNTVKKAQ

SEQ ID NO: 1127 - protein, 11 aa, Artificial Sequence
  Synthesized
AQHNNTVVSAQ

SEQ ID NO: 1128 - protein, 11 aa, Artificial Sequence
  Synthesized
AQHNPAPYSAQ

SEQ ID NO: 1129 - protein, 11 aa, Artificial Sequence
  Synthesized
AQHNPDYGSAQ

SEQ ID NO: 1130 - protein, 11 aa, Artificial Sequence
  Synthesized
AQHNPEYVSAQ

SEQ ID NO: 1131 - protein, 11 aa, Artificial Sequence
  Synthesized
AQHNPFKRSAQ

SEQ ID NO: 1132 - protein, 11 aa, Artificial Sequence
  Synthesized
AQHNPHPESAQ

SEQ ID NO: 1133 - protein, 11 aa, Artificial Sequence
  Synthesized
AQHNPHRRSAQ

SEQ ID NO: 1134 - protein, 11 aa, Artificial Sequence
  Synthesized
AQHNPHRYSAQ

SEQ ID NO: 1135 - protein, 11 aa, Artificial Sequence
  Synthesized
AQHNPKARSAQ

SEQ ID NO: 1136 - protein, 11 aa, Artificial Sequence
  Synthesized
AQHNPNEFSAQ

SEQ ID NO: 1137 - protein, 11 aa, Artificial Sequence
  Synthesized
AQHNPPGPSAQ

SEQ ID NO: 1138 - protein, 11 aa, Artificial Sequence
  Synthesized
AQHNPPHKSAQ

SEQ ID NO: 1139 - protein, 11 aa, Artificial Sequence
  Synthesized
AQHNPPIESAQ

SEQ ID NO: 1140 - protein, 11 aa, Artificial Sequence
  Synthesized
AQHNPPVHSAQ

SEQ ID NO: 1141 - protein, 11 aa, Artificial Sequence
  Synthesized
AQHNPRFTSAQ

SEQ ID NO: 1142 - protein, 11 aa, Artificial Sequence
  Synthesized
AQHNPSEPSAQ

SEQ ID NO: 1143 - protein, 11 aa, Artificial Sequence
  Synthesized
AQHNPSKRSAQ

SEQ ID NO: 1144 - protein, 11 aa, Artificial Sequence
  Synthesized
AQHNPTRLDAQ

SEQ ID NO: 1145 - protein, 11 aa, Artificial Sequence
  Synthesized
AQHNPTRRKAQ

SEQ ID NO: 1146 - protein, 11 aa, Artificial Sequence
  Synthesized
AQHNPVGRSAQ

SEQ ID NO: 1147 - protein, 11 aa, Artificial Sequence
  Synthesized
AQHNPVHRSAQ

SEQ ID NO: 1148 - protein, 11 aa, Artificial Sequence
  Synthesized
AQHNPVKRSAQ

SEQ ID NO: 1149 - protein, 11 aa, Artificial Sequence
  Synthesized
AQHNPVMRSAQ

SEQ ID NO: 1150 - protein, 11 aa, Artificial Sequence
  Synthesized
AQHNPVNRSAQ

SEQ ID NO: 1151 - protein, 11 aa, Artificial Sequence
  Synthesized
AQHNPVPRSAQ

SEQ ID NO: 1152 - protein, 11 aa, Artificial Sequence
  Synthesized
AQHNPVRRSAQ

SEQ ID NO: 1153 - protein, 11 aa, Artificial Sequence
  Synthesized
AQHNPVYRSAQ

SEQ ID NO: 1154 - protein, 11 aa, Artificial Sequence
  Synthesized
AQHNPYFFSAQ

SEQ ID NO: 1155 - protein, 11 aa, Artificial Sequence
  Synthesized
AQHNRTQNAAQ

SEQ ID NO: 1156 - protein, 11 aa, Artificial Sequence
  Synthesized
AQHNRTRGQAQ

SEQ ID NO: 1157 - protein, 11 aa, Artificial Sequence
  Synthesized
AQHNSRSAMAQ

SEQ ID NO: 1158 - protein, 11 aa, Artificial Sequence
  Synthesized
AQHNSVKNSAQ

SEQ ID NO: 1159 - protein, 11 aa, Artificial Sequence
  Synthesized
AQHNTGHGLAQ

SEQ ID NO: 1160 - protein, 11 aa, Artificial Sequence
  Synthesized
AQHNTQLRAAQ

SEQ ID NO: 1161 - protein, 11 aa, Artificial Sequence
  Synthesized
AQHNVTRMFAQ

SEQ ID NO: 1162 - protein, 11 aa, Artificial Sequence
  Synthesized
AQHNYTRAHAQ

SEQ ID NO: 1163 - protein, 11 aa, Artificial Sequence
  Synthesized
AQHNYTRFPAQ

SEQ ID NO: 1164 - protein, 11 aa, Artificial Sequence
  Synthesized
AQHNYTRRHAQ

SEQ ID NO: 1165 - protein, 11 aa, Artificial Sequence
  Synthesized
AQHNYTRRYAQ

SEQ ID NO: 1166 - protein, 11 aa, Artificial Sequence
  Synthesized
AQHPGESFMAQ

SEQ ID NO: 1167 - protein, 11 aa, Artificial Sequence
  Synthesized
AQHPKRSAMAQ

SEQ ID NO: 1168 - protein, 11 aa, Artificial Sequence
  Synthesized
AQHPLPESHAQ

SEQ ID NO: 1169 - protein, 11 aa, Artificial Sequence
  Synthesized
AQHPLPGHFAQ

SEQ ID NO: 1170 - protein, 11 aa, Artificial Sequence
  Synthesized
AQHPLPHQAAQ

SEQ ID NO: 1171 - protein, 11 aa, Artificial Sequence
  Synthesized
AQHPLPRFLAQ

SEQ ID NO: 1172 - protein, 11 aa, Artificial Sequence
  Synthesized
AQHPLPRHPAQ

SEQ ID NO: 1173 - protein, 11 aa, Artificial Sequence
  Synthesized
AQHPLPRRTAQ

SEQ ID NO: 1174 - protein, 11 aa, Artificial Sequence
  Synthesized
AQHPLPRYPAQ

SEQ ID NO: 1175 - protein, 11 aa, Artificial Sequence
  Synthesized
AQHPLPVPDAQ

SEQ ID NO: 1176 - protein, 11 aa, Artificial Sequence
  Synthesized
AQHPSKNQLAQ

SEQ ID NO: 1177 - protein, 11 aa, Artificial Sequence
  Synthesized
AQHPSRNLNAQ

SEQ ID NO: 1178 - protein, 11 aa, Artificial Sequence
  Synthesized
AQHQGGSAMAQ

SEQ ID NO: 1179 - protein, 11 aa, Artificial Sequence
  Synthesized
AQHQHIVPSAQ

SEQ ID NO: 1180 - protein, 11 aa, Artificial Sequence
  Synthesized
AQHQKHSFMAQ

SEQ ID NO: 1181 - protein, 11 aa, Artificial Sequence
  Synthesized
AQHQKIMPNAQ

SEQ ID NO: 1182 - protein, 11 aa, Artificial Sequence
  Synthesized
AQHQLPFHPAQ

SEQ ID NO: 1183 - protein, 11 aa, Artificial Sequence
  Synthesized
AQHQLPRTEAQ

SEQ ID NO: 1184 - protein, 11 aa, Artificial Sequence
  Synthesized
AQHQNVIPPAQ

SEQ ID NO: 1185 - protein, 11 aa, Artificial Sequence
  Synthesized
AQHQRFSAMAQ

SEQ ID NO: 1186 - protein, 11 aa, Artificial Sequence
  Synthesized
AQHQRTVNLAQ

SEQ ID NO: 1187 - protein, 11 aa, Artificial Sequence
  Synthesized
AQHRGRSAMAQ

SEQ ID NO: 1188 - protein, 11 aa, Artificial Sequence
  Synthesized
AQHRLPRHNAQ

SEQ ID NO: 1189 - protein, 11 aa, Artificial Sequence
  Synthesized
AQHRLPRPGAQ

SEQ ID NO: 1190 - protein, 11 aa, Artificial Sequence
  Synthesized
AQHRLPRYYAQ

SEQ ID NO: 1191 - protein, 11 aa, Artificial Sequence
  Synthesized
AQHRNSAGVAQ

SEQ ID NO: 1192 - protein, 11 aa, Artificial Sequence
  Synthesized
AQHRSLTGNAQ

SEQ ID NO: 1193 - protein, 11 aa, Artificial Sequence
  Synthesized
AQHSATRSPAQ

SEQ ID NO: 1194 - protein, 11 aa, Artificial Sequence
  Synthesized
AQHSGLQHDAQ

SEQ ID NO: 1195 - protein, 11 aa, Artificial Sequence
  Synthesized
AQHSGSSSIAQ

SEQ ID NO: 1196 - protein, 11 aa, Artificial Sequence
  Synthesized
AQHSHLKSEAQ

SEQ ID NO: 1197 - protein, 11 aa, Artificial Sequence
  Synthesized
AQHSKPAANAQ

SEQ ID NO: 1198 - protein, 11 aa, Artificial Sequence
  Synthesized
AQHSLPPFGAQ

SEQ ID NO: 1199 - protein, 11 aa, Artificial Sequence
  Synthesized
AQHSLPRKNAQ

SEQ ID NO: 1200 - protein, 11 aa, Artificial Sequence
  Synthesized
AQHSLTNMRAQ

SEQ ID NO: 1201 - protein, 11 aa, Artificial Sequence
  Synthesized
AQHSQQLAQAQ

SEQ ID NO: 1202 - protein, 11 aa, Artificial Sequence
  Synthesized
AQHSRLGSVAQ

SEQ ID NO: 1203 - protein, 11 aa, Artificial Sequence
  Synthesized
AQHSTASAMAQ

SEQ ID NO: 1204 - protein, 11 aa, Artificial Sequence
  Synthesized
AQHSTKFNGAQ

SEQ ID NO: 1205 - protein, 11 aa, Artificial Sequence
  Synthesized
AQHSTRNPDAQ

SEQ ID NO: 1206 - protein, 11 aa, Artificial Sequence
  Synthesized
AQHSVVNDRAQ

SEQ ID NO: 1207 - protein, 11 aa, Artificial Sequence
  Synthesized
AQHTKEVLTAQ

SEQ ID NO: 1208 - protein, 11 aa, Artificial Sequence
  Synthesized
AQHTLNRLEAQ

SEQ ID NO: 1209 - protein, 11 aa, Artificial Sequence
  Synthesized
AQHTLPKVKAQ

SEQ ID NO: 1210 - protein, 11 aa, Artificial Sequence
  Synthesized
AQHTLPRGQAQ

SEQ ID NO: 1211 - protein, 11 aa, Artificial Sequence
  Synthesized
AQHTLPRHTAQ

SEQ ID NO: 1212 - protein, 11 aa, Artificial Sequence
  Synthesized
AQHTMTSFMAQ

SEQ ID NO: 1213 - protein, 11 aa, Artificial Sequence
  Synthesized
AQHTQETMYAQ

SEQ ID NO: 1214 - protein, 11 aa, Artificial Sequence
  Synthesized
AQHTQLRLPAQ

SEQ ID NO: 1215 - protein, 11 aa, Artificial Sequence
  Synthesized
AQHTSPSVMAQ

SEQ ID NO: 1216 - protein, 11 aa, Artificial Sequence
  Synthesized
AQHTTMNPKAQ

SEQ ID NO: 1217 - protein, 11 aa, Artificial Sequence
  Synthesized
AQHTTSIHNAQ

SEQ ID NO: 1218 - protein, 11 aa, Artificial Sequence
  Synthesized
AQHVSTQKLAQ

SEQ ID NO: 1219 - protein, 11 aa, Artificial Sequence
  Synthesized
AQHVTQLRDAQ

SEQ ID NO: 1220 - protein, 11 aa, Artificial Sequence
  Synthesized
AQHVVLQTEAQ

SEQ ID NO: 1221 - protein, 11 aa, Artificial Sequence
  Synthesized
AQHYANTKSAQ

SEQ ID NO: 1222 - protein, 11 aa, Artificial Sequence
  Synthesized
AQHYGLSAMAQ

SEQ ID NO: 1223 - protein, 11 aa, Artificial Sequence
  Synthesized
AQHYHNSFMAQ

SEQ ID NO: 1224 - protein, 11 aa, Artificial Sequence
  Synthesized
AQHYLPHRSAQ

SEQ ID NO: 1225 - protein, 11 aa, Artificial Sequence
  Synthesized
AQHYLPRIGAQ

SEQ ID NO: 1226 - protein, 11 aa, Artificial Sequence
  Synthesized
AQHYLPSPFAQ

SEQ ID NO: 1227 - protein, 11 aa, Artificial Sequence
  Synthesized
AQHYQMSFMAQ

SEQ ID NO: 1228 - protein, 11 aa, Artificial Sequence
  Synthesized
AQIAAVGVLAQ

SEQ ID NO: 1229 - protein, 11 aa, Artificial Sequence
  Synthesized
AQIAGRNQSAQ

SEQ ID NO: 1230 - protein, 11 aa, Artificial Sequence
  Synthesized
AQIAKLKTDAQ

SEQ ID NO: 1231 - protein, 11 aa, Artificial Sequence
  Synthesized
AQIAKTEMRAQ

SEQ ID NO: 1232 - protein, 11 aa, Artificial Sequence
  Synthesized
AQIALSIPQAQ

SEQ ID NO: 1233 - protein, 11 aa, Artificial Sequence
  Synthesized
AQIALTNRPAQ

SEQ ID NO: 1234 - protein, 11 aa, Artificial Sequence
  Synthesized
AQIAQSSSRAQ

SEQ ID NO: 1235 - protein, 11 aa, Artificial Sequence
  Synthesized
AQIARLSGNAQ

SEQ ID NO: 1236 - protein, 11 aa, Artificial Sequence
  Synthesized
AQIARSVAPAQ

SEQ ID NO: 1237 - protein, 11 aa, Artificial Sequence
  Synthesized
AQIARTMQSAQ

SEQ ID NO: 1238 - protein, 11 aa, Artificial Sequence
  Synthesized
AQIASAPMQAQ

SEQ ID NO: 1239 - protein, 11 aa, Artificial Sequence
  Synthesized
AQIASIGQTAQ

SEQ ID NO: 1240 - protein, 11 aa, Artificial Sequence
  Synthesized
AQIATRGGAAQ

SEQ ID NO: 1241 - protein, 11 aa, Artificial Sequence
  Synthesized
AQIATRGSSAQ

SEQ ID NO: 1242 - protein, 11 aa, Artificial Sequence
  Synthesized
AQIAVKSKDAQ

SEQ ID NO: 1243 - protein, 11 aa, Artificial Sequence
  Synthesized
AQIDANIPLAQ

SEQ ID NO: 1244 - protein, 11 aa, Artificial Sequence
  Synthesized
AQIDLPQGHAQ

SEQ ID NO: 1245 - protein, 11 aa, Artificial Sequence
  Synthesized
AQIDLPRFKAQ

SEQ ID NO: 1246 - protein, 11 aa, Artificial Sequence
  Synthesized
AQIDNRLKAAQ

SEQ ID NO: 1247 - protein, 11 aa, Artificial Sequence
  Synthesized
AQIDYTGEQAQ

SEQ ID NO: 1248 - protein, 11 aa, Artificial Sequence
  Synthesized
AQIELPRPRAQ

SEQ ID NO: 1249 - protein, 11 aa, Artificial Sequence
  Synthesized
AQIERTRVGAQ

SEQ ID NO: 1250 - protein, 11 aa, Artificial Sequence
  Synthesized
AQIFNSNQIAQ

SEQ ID NO: 1251 - protein, 11 aa, Artificial Sequence
  Synthesized
AQIGAVSRTAQ

SEQ ID NO: 1252 - protein, 11 aa, Artificial Sequence
  Synthesized
AQIGDPRDPAQ

SEQ ID NO: 1253 - protein, 11 aa, Artificial Sequence
  Synthesized
AQIGEGTPMAQ

SEQ ID NO: 1254 - protein, 11 aa, Artificial Sequence
  Synthesized
AQIGGTLRAAQ

SEQ ID NO: 1255 - protein, 11 aa, Artificial Sequence
  Synthesized
AQIGGYGTQAQ

SEQ ID NO: 1256 - protein, 11 aa, Artificial Sequence
  Synthesized
AQIGKITNMAQ

SEQ ID NO: 1257 - protein, 11 aa, Artificial Sequence
  Synthesized
AQIGKSGSFAQ

SEQ ID NO: 1258 - protein, 11 aa, Artificial Sequence
  Synthesized
AQIGLNHAMAQ

SEQ ID NO: 1259 - protein, 11 aa, Artificial Sequence
  Synthesized
AQIGLPMGVAQ

SEQ ID NO: 1260 - protein, 11 aa, Artificial Sequence
  Synthesized
AQIGLPRYNAQ

SEQ ID NO: 1261 - protein, 11 aa, Artificial Sequence
  Synthesized
AQIGLQNVKAQ

SEQ ID NO: 1262 - protein, 11 aa, Artificial Sequence
  Synthesized
AQIGQGIIRAQ

SEQ ID NO: 1263 - protein, 11 aa, Artificial Sequence
  Synthesized
AQIGRHSAMAQ

SEQ ID NO: 1264 - protein, 11 aa, Artificial Sequence
  Synthesized
AQIGRTTMPAQ

SEQ ID NO: 1265 - protein, 11 aa, Artificial Sequence
  Synthesized
AQIGRVGSPAQ

SEQ ID NO: 1266 - protein, 11 aa, Artificial Sequence
  Synthesized
AQIGTAHTPAQ

SEQ ID NO: 1267 - protein, 11 aa, Artificial Sequence
  Synthesized
AQIGTERQKAQ

SEQ ID NO: 1268 - protein, 11 aa, Artificial Sequence
  Synthesized
AQIGTTRATAQ

SEQ ID NO: 1269 - protein, 11 aa, Artificial Sequence
  Synthesized
AQIGYGSFMAQ

SEQ ID NO: 1270 - protein, 11 aa, Artificial Sequence
  Synthesized
AQIHAVSFMAQ

SEQ ID NO: 1271 - protein, 11 aa, Artificial Sequence
  Synthesized
AQIHLPGRSAQ

SEQ ID NO: 1272 - protein, 11 aa, Artificial Sequence
  Synthesized
AQIHLPRGPAQ

SEQ ID NO: 1273 - protein, 11 aa, Artificial Sequence
  Synthesized
AQIHLPRILAQ

SEQ ID NO: 1274 - protein, 11 aa, Artificial Sequence
  Synthesized
AQIHSNQKFAQ

SEQ ID NO: 1275 - protein, 11 aa, Artificial Sequence
  Synthesized
AQIHSVVGSAQ

SEQ ID NO: 1276 - protein, 11 aa, Artificial Sequence
  Synthesized
AQIHTNNSPAQ

SEQ ID NO: 1277 - protein, 11 aa, Artificial Sequence
  Synthesized
AQIHYMSAMAQ

SEQ ID NO: 1278 - protein, 11 aa, Artificial Sequence
  Synthesized
AQIIHTSSQAQ

SEQ ID NO: 1279 - protein, 11 aa, Artificial Sequence
  Synthesized
AQIIQMSQKAQ

SEQ ID NO: 1280 - protein, 11 aa, Artificial Sequence
  Synthesized
AQIIVNAKAAQ

SEQ ID NO: 1281 - protein, 11 aa, Artificial Sequence
  Synthesized
AQIKALNASAQ

SEQ ID NO: 1282 - protein, 11 aa, Artificial Sequence
  Synthesized
AQIKAQTEHAQ

SEQ ID NO: 1283 - protein, 11 aa, Artificial Sequence
  Synthesized
AQIKASNVYAQ

SEQ ID NO: 1284 - protein, 11 aa, Artificial Sequence
  Synthesized
AQIKESTSTAQ

SEQ ID NO: 1285 - protein, 11 aa, Artificial Sequence
  Synthesized
AQIKHGMNTAQ

SEQ ID NO: 1286 - protein, 11 aa, Artificial Sequence
  Synthesized
AQIKKPGNIAQ

SEQ ID NO: 1287 - protein, 11 aa, Artificial Sequence
  Synthesized
AQIKLPPFFAQ

SEQ ID NO: 1288 - protein, 11 aa, Artificial Sequence
  Synthesized
AQIKQMPGVAQ

SEQ ID NO: 1289 - protein, 11 aa, Artificial Sequence
  Synthesized
AQILDRSAMAQ

SEQ ID NO: 1290 - protein, 11 aa, Artificial Sequence
  Synthesized
AQILDRTGSAQ

SEQ ID NO: 1291 - protein, 11 aa, Artificial Sequence
  Synthesized
AQILHTSRPAQ

SEQ ID NO: 1292 - protein, 11 aa, Artificial Sequence
  Synthesized
AQILKQGAAAQ

SEQ ID NO: 1293 - protein, 11 aa, Artificial Sequence
  Synthesized
AQILLQTKAAQ

SEQ ID NO: 1294 - protein, 11 aa, Artificial Sequence
  Synthesized
AQILPKVEMAQ

SEQ ID NO: 1295 - protein, 11 aa, Artificial Sequence
  Synthesized
AQILPSTRPAQ

SEQ ID NO: 1296 - protein, 11 aa, Artificial Sequence
  Synthesized
AQILSTAQTAQ

SEQ ID NO: 1297 - protein, 11 aa, Artificial Sequence
  Synthesized
AQILTNKQSAQ

SEQ ID NO: 1298 - protein, 11 aa, Artificial Sequence
  Synthesized
AQILTTKVAAQ

SEQ ID NO: 1299 - protein, 11 aa, Artificial Sequence
  Synthesized
AQILTTVALAQ

SEQ ID NO: 1300 - protein, 11 aa, Artificial Sequence
  Synthesized
AQILVDTHSAQ

SEQ ID NO: 1301 - protein, 11 aa, Artificial Sequence
  Synthesized
AQIMRQGQSAQ

SEQ ID NO: 1302 - protein, 11 aa, Artificial Sequence
  Synthesized
AQINGGRSPAQ

SEQ ID NO: 1303 - protein, 11 aa, Artificial Sequence
  Synthesized
AQINGTRFFAQ

SEQ ID NO: 1304 - protein, 11 aa, Artificial Sequence
  Synthesized
AQINHGLTKAQ

SEQ ID NO: 1305 - protein, 11 aa, Artificial Sequence
  Synthesized
AQINHQVQSAQ

SEQ ID NO: 1306 - protein, 11 aa, Artificial Sequence
  Synthesized
AQINHTRYKAQ

SEQ ID NO: 1307 - protein, 11 aa, Artificial Sequence
  Synthesized
AQINKTRRMAQ

SEQ ID NO: 1308 - protein, 11 aa, Artificial Sequence
  Synthesized
AQINKTRSNAQ

SEQ ID NO: 1309 - protein, 11 aa, Artificial Sequence
  Synthesized
AQINLPRKEAQ

SEQ ID NO: 1310 - protein, 11 aa, Artificial Sequence
  Synthesized
AQINLPYMFAQ

SEQ ID NO: 1311 - protein, 11 aa, Artificial Sequence
  Synthesized
AQINNTEMYAQ

SEQ ID NO: 1312 - protein, 11 aa, Artificial Sequence
  Synthesized
AQINNTHMQAQ

SEQ ID NO: 1313 - protein, 11 aa, Artificial Sequence
  Synthesized
AQINNTIPHAQ

SEQ ID NO: 1314 - protein, 11 aa, Artificial Sequence
  Synthesized
AQINNTRFTAQ

SEQ ID NO: 1315 - protein, 11 aa, Artificial Sequence
  Synthesized
AQINPGKISAQ

SEQ ID NO: 1316 - protein, 11 aa, Artificial Sequence
  Synthesized
AQINPKDMSAQ

SEQ ID NO: 1317 - protein, 11 aa, Artificial Sequence
  Synthesized
AQINPKSRSAQ

SEQ ID NO: 1318 - protein, 11 aa, Artificial Sequence
  Synthesized
AQINPMRNQAQ

SEQ ID NO: 1319 - protein, 11 aa, Artificial Sequence
  Synthesized
AQINPPPMSAQ

SEQ ID NO: 1320 - protein, 11 aa, Artificial Sequence
  Synthesized
AQINPQKERAQ

SEQ ID NO: 1321 - protein, 11 aa, Artificial Sequence
  Synthesized
AQINPTRGYAQ

SEQ ID NO: 1322 - protein, 11 aa, Artificial Sequence
  Synthesized
AQINPTRPYAQ

SEQ ID NO: 1323 - protein, 11 aa, Artificial Sequence
  Synthesized
AQINPVFRSAQ

SEQ ID NO: 1324 - protein, 11 aa, Artificial Sequence
  Synthesized
AQINPVPRSAQ

SEQ ID NO: 1325 - protein, 11 aa, Artificial Sequence
  Synthesized
AQINPVYRSAQ

SEQ ID NO: 1326 - protein, 11 aa, Artificial Sequence
  Synthesized
AQINPYPGSAQ

SEQ ID NO: 1327 - protein, 11 aa, Artificial Sequence
  Synthesized
AQINRDPSKAQ

SEQ ID NO: 1328 - protein, 11 aa, Artificial Sequence
  Synthesized
AQINSIKPTAQ

SEQ ID NO: 1329 - protein, 11 aa, Artificial Sequence
  Synthesized
AQINSKAMIAQ

SEQ ID NO: 1330 - protein, 11 aa, Artificial Sequence
  Synthesized
AQINSKTEMAQ

SEQ ID NO: 1331 - protein, 11 aa, Artificial Sequence
  Synthesized
AQINSPRSPAQ

SEQ ID NO: 1332 - protein, 11 aa, Artificial Sequence
  Synthesized
AQINSTRKIAQ

SEQ ID NO: 1333 - protein, 11 aa, Artificial Sequence
  Synthesized
AQINSTRSKAQ

SEQ ID NO: 1334 - protein, 11 aa, Artificial Sequence
  Synthesized
AQINTALAPAQ

SEQ ID NO: 1335 - protein, 11 aa, Artificial Sequence
  Synthesized
AQINTHPISAQ

SEQ ID NO: 1336 - protein, 11 aa, Artificial Sequence
  Synthesized
AQIPGNLDKAQ

SEQ ID NO: 1337 - protein, 11 aa, Artificial Sequence
  Synthesized
AQIPGSGKMAQ

SEQ ID NO: 1338 - protein, 11 aa, Artificial Sequence
  Synthesized
AQIPIRAADAQ

SEQ ID NO: 1339 - protein, 11 aa, Artificial Sequence
  Synthesized
AQIPKSAISAQ

SEQ ID NO: 1340 - protein, 11 aa, Artificial Sequence
  Synthesized
AQIPKSMPLAQ

SEQ ID NO: 1341 - protein, 11 aa, Artificial Sequence
  Synthesized
AQIPKTKPPAQ

SEQ ID NO: 1342 - protein, 11 aa, Artificial Sequence
  Synthesized
AQIPLNNRMAQ

SEQ ID NO: 1343 - protein, 11 aa, Artificial Sequence
  Synthesized
AQIPLPRYQAQ

SEQ ID NO: 1344 - protein, 11 aa, Artificial Sequence
  Synthesized
AQIPQTPRGAQ

SEQ ID NO: 1345 - protein, 11 aa, Artificial Sequence
  Synthesized
AQIPRLEQSAQ

SEQ ID NO: 1346 - protein, 11 aa, Artificial Sequence
  Synthesized
AQIPSRNSHAQ

SEQ ID NO: 1347 - protein, 11 aa, Artificial Sequence
  Synthesized
AQIPSTQQRAQ

SEQ ID NO: 1348 - protein, 11 aa, Artificial Sequence
  Synthesized
AQIPTKSVLAQ

SEQ ID NO: 1349 - protein, 11 aa, Artificial Sequence
  Synthesized
AQIPYPSAMAQ

SEQ ID NO: 1350 - protein, 11 aa, Artificial Sequence
  Synthesized
AQIQHDDLLAQ

SEQ ID NO: 1351 - protein, 11 aa, Artificial Sequence
  Synthesized
AQIQHSPERAQ

SEQ ID NO: 1352 - protein, 11 aa, Artificial Sequence
  Synthesized
AQIQLPGNPAQ

SEQ ID NO: 1353 - protein, 11 aa, Artificial Sequence
  Synthesized
AQIQLPKGEAQ

SEQ ID NO: 1354 - protein, 11 aa, Artificial Sequence
  Synthesized
AQIQNIRGSAQ

SEQ ID NO: 1355 - protein, 11 aa, Artificial Sequence
  Synthesized
AQIQPSQSNAQ

SEQ ID NO: 1356 - protein, 11 aa, Artificial Sequence
  Synthesized
AQIQQSIGKAQ

SEQ ID NO: 1357 - protein, 11 aa, Artificial Sequence
  Synthesized
AQIQSASRPAQ

SEQ ID NO: 1358 - protein, 11 aa, Artificial Sequence
  Synthesized
AQIQSPLPMAQ

SEQ ID NO: 1359 - protein, 11 aa, Artificial Sequence
  Synthesized
AQIQTKFLAAQ

SEQ ID NO: 1360 - protein, 11 aa, Artificial Sequence
  Synthesized
AQIQTRAAPAQ

SEQ ID NO: 1361 - protein, 11 aa, Artificial Sequence
  Synthesized
AQIREKMAPAQ

SEQ ID NO: 1362 - protein, 11 aa, Artificial Sequence
  Synthesized
AQIRGHSAMAQ

SEQ ID NO: 1363 - protein, 11 aa, Artificial Sequence
  Synthesized
AQIRHADISAQ

SEQ ID NO: 1364 - protein, 11 aa, Artificial Sequence
  Synthesized
AQIRQRELDAQ

SEQ ID NO: 1365 - protein, 11 aa, Artificial Sequence
  Synthesized
AQIRRSTDDAQ

SEQ ID NO: 1366 - protein, 11 aa, Artificial Sequence
  Synthesized
AQIRSNTGSAQ

SEQ ID NO: 1367 - protein, 11 aa, Artificial Sequence
  Synthesized
AQIRTATSSAQ

SEQ ID NO: 1368 - protein, 11 aa, Artificial Sequence
  Synthesized
AQIRVSTVTAQ

SEQ ID NO: 1369 - protein, 11 aa, Artificial Sequence
  Synthesized
AQIRVTPGGAQ

SEQ ID NO: 1370 - protein, 11 aa, Artificial Sequence
  Synthesized
AQISGLKNVAQ

SEQ ID NO: 1371 - protein, 11 aa, Artificial Sequence
  Synthesized
AQISGPIRNAQ

SEQ ID NO: 1372 - protein, 11 aa, Artificial Sequence
  Synthesized
AQISGRNLNAQ

SEQ ID NO: 1373 - protein, 11 aa, Artificial Sequence
  Synthesized
AQISGSSAMAQ

SEQ ID NO: 1374 - protein, 11 aa, Artificial Sequence
  Synthesized
AQISKTMISAQ

SEQ ID NO: 1375 - protein, 11 aa, Artificial Sequence
  Synthesized
AQISNPTKMAQ

SEQ ID NO: 1376 - protein, 11 aa, Artificial Sequence
  Synthesized
AQISPMARAAQ

SEQ ID NO: 1377 - protein, 11 aa, Artificial Sequence
  Synthesized
AQISPTKYTAQ

SEQ ID NO: 1378 - protein, 11 aa, Artificial Sequence
  Synthesized
AQISQSPRLAQ

SEQ ID NO: 1379 - protein, 11 aa, Artificial Sequence
  Synthesized
AQISRAYGQAQ

SEQ ID NO: 1380 - protein, 11 aa, Artificial Sequence
  Synthesized
AQISRDHTQAQ

SEQ ID NO: 1381 - protein, 11 aa, Artificial Sequence
  Synthesized
AQISRGVTAAQ

SEQ ID NO: 1382 - protein, 11 aa, Artificial Sequence
  Synthesized
AQISSDTRRAQ

SEQ ID NO: 1383 - protein, 11 aa, Artificial Sequence
  Synthesized
AQISSGKNLAQ

SEQ ID NO: 1384 - protein, 11 aa, Artificial Sequence
  Synthesized
AQISSKTSLAQ

SEQ ID NO: 1385 - protein, 11 aa, Artificial Sequence
  Synthesized
AQISSQRPIAQ

SEQ ID NO: 1386 - protein, 11 aa, Artificial Sequence
  Synthesized
AQISSSESSAQ

SEQ ID NO: 1387 - protein, 11 aa, Artificial Sequence
  Synthesized
AQISSSSSSAQ

SEQ ID NO: 1388 - protein, 11 aa, Artificial Sequence
  Synthesized
AQITGNSMLAQ

SEQ ID NO: 1389 - protein, 11 aa, Artificial Sequence
  Synthesized
AQITGSPSPAQ

SEQ ID NO: 1390 - protein, 11 aa, Artificial Sequence
  Synthesized
AQITIREGKAQ

SEQ ID NO: 1391 - protein, 11 aa, Artificial Sequence
  Synthesized
AQITKTDSDAQ

SEQ ID NO: 1392 - protein, 11 aa, Artificial Sequence
  Synthesized
AQITKVGESAQ

SEQ ID NO: 1393 - protein, 11 aa, Artificial Sequence
  Synthesized
AQITPLPRTAQ

SEQ ID NO: 1394 - protein, 11 aa, Artificial Sequence
  Synthesized
AQITQLRHNAQ

SEQ ID NO: 1395 - protein, 11 aa, Artificial Sequence
  Synthesized
AQITQQMKAAQ

SEQ ID NO: 1396 - protein, 11 aa, Artificial Sequence
  Synthesized
AQITSKVHTAQ

SEQ ID NO: 1397 - protein, 11 aa, Artificial Sequence
  Synthesized
AQITSTSVRAQ

SEQ ID NO: 1398 - protein, 11 aa, Artificial Sequence
  Synthesized
AQITVSNSMAQ

SEQ ID NO: 1399 - protein, 11 aa, Artificial Sequence
  Synthesized
AQIVAGHRDAQ

SEQ ID NO: 1400 - protein, 11 aa, Artificial Sequence
  Synthesized
AQIVARSGSAQ

SEQ ID NO: 1401 - protein, 11 aa, Artificial Sequence
  Synthesized
AQIVGMSLIAQ

SEQ ID NO: 1402 - protein, 11 aa, Artificial Sequence
  Synthesized
AQIVHNTDIAQ

SEQ ID NO: 1403 - protein, 11 aa, Artificial Sequence
  Synthesized
AQIVHTSSSAQ

SEQ ID NO: 1404 - protein, 11 aa, Artificial Sequence
  Synthesized
AQIVKDTPRAQ

SEQ ID NO: 1405 - protein, 11 aa, Artificial Sequence
  Synthesized
AQIVKGVTSAQ

SEQ ID NO: 1406 - protein, 11 aa, Artificial Sequence
  Synthesized
AQIVKNEKMAQ

SEQ ID NO: 1407 - protein, 11 aa, Artificial Sequence
  Synthesized
AQIVPGMAPAQ

SEQ ID NO: 1408 - protein, 11 aa, Artificial Sequence
  Synthesized
AQIVQQRSGAQ

SEQ ID NO: 1409 - protein, 11 aa, Artificial Sequence
  Synthesized
AQIVRDNIKAQ

SEQ ID NO: 1410 - protein, 11 aa, Artificial Sequence
  Synthesized
AQIVRGSGIAQ

SEQ ID NO: 1411 - protein, 11 aa, Artificial Sequence
  Synthesized
AQIVSSSAKAQ

SEQ ID NO: 1412 - protein, 11 aa, Artificial Sequence
  Synthesized
AQIVVNHESAQ

SEQ ID NO: 1413 - protein, 11 aa, Artificial Sequence
  Synthesized
AQIYHYSAMAQ

SEQ ID NO: 1414 - protein, 11 aa, Artificial Sequence
  Synthesized
AQIYIPSFMAQ

SEQ ID NO: 1415 - protein, 11 aa, Artificial Sequence
  Synthesized
AQIYLPRANAQ

SEQ ID NO: 1416 - protein, 11 aa, Artificial Sequence
  Synthesized
AQIYLPRYHAQ

SEQ ID NO: 1417 - protein, 11 aa, Artificial Sequence
  Synthesized
AQIYSASTPAQ

SEQ ID NO: 1418 - protein, 11 aa, Artificial Sequence
  Synthesized
AQKAANVLTAQ

SEQ ID NO: 1419 - protein, 11 aa, Artificial Sequence
  Synthesized
AQKAAQSGPAQ

SEQ ID NO: 1420 - protein, 11 aa, Artificial Sequence
  Synthesized
AQKAASLSFAQ

SEQ ID NO: 1421 - protein, 11 aa, Artificial Sequence
  Synthesized
AQKAFGSSDAQ

SEQ ID NO: 1422 - protein, 11 aa, Artificial Sequence
  Synthesized
AQKAGTVMSAQ

SEQ ID NO: 1423 - protein, 11 aa, Artificial Sequence
  Synthesized
AQKAHVAEVAQ

SEQ ID NO: 1424 - protein, 11 aa, Artificial Sequence
  Synthesized
AQKALKTDLAQ

SEQ ID NO: 1425 - protein, 11 aa, Artificial Sequence
  Synthesized
AQKALMSNAAQ

SEQ ID NO: 1426 - protein, 11 aa, Artificial Sequence
  Synthesized
AQKASNHLSAQ

SEQ ID NO: 1427 - protein, 11 aa, Artificial Sequence
  Synthesized
AQKAVSSSAAQ

SEQ ID NO: 1428 - protein, 11 aa, Artificial Sequence
  Synthesized
AQKAVVTTAAQ

SEQ ID NO: 1429 - protein, 11 aa, Artificial Sequence
  Synthesized
AQKDFMSAMAQ

SEQ ID NO: 1430 - protein, 11 aa, Artificial Sequence
  Synthesized
AQKDMQTMSAQ

SEQ ID NO: 1431 - protein, 11 aa, Artificial Sequence
  Synthesized
AQKDNKSFMAQ

SEQ ID NO: 1432 - protein, 11 aa, Artificial Sequence
  Synthesized
AQKDSRSSVAQ

SEQ ID NO: 1433 - protein, 11 aa, Artificial Sequence
  Synthesized
AQKEAYSFMAQ

SEQ ID NO: 1434 - protein, 11 aa, Artificial Sequence
  Synthesized
AQKELPRMYAQ

SEQ ID NO: 1435 - protein, 11 aa, Artificial Sequence
  Synthesized
AQKELPYSPAQ

SEQ ID NO: 1436 - protein, 11 aa, Artificial Sequence
  Synthesized
AQKESAKVLAQ

SEQ ID NO: 1437 - protein, 11 aa, Artificial Sequence
  Synthesized
AQKFHFSFMAQ

SEQ ID NO: 1438 - protein, 11 aa, Artificial Sequence
  Synthesized
AQKFLPRVAAQ

SEQ ID NO: 1439 - protein, 11 aa, Artificial Sequence
  Synthesized
AQKGASVSPAQ

SEQ ID NO: 1440 - protein, 11 aa, Artificial Sequence
  Synthesized
AQKGDMAMIAQ

SEQ ID NO: 1441 - protein, 11 aa, Artificial Sequence
  Synthesized
AQKGKEVMMAQ

SEQ ID NO: 1442 - protein, 11 aa, Artificial Sequence
  Synthesized
AQKGLPGPYAQ

SEQ ID NO: 1443 - protein, 11 aa, Artificial Sequence
  Synthesized
AQKGLPRGVAQ

SEQ ID NO: 1444 - protein, 11 aa, Artificial Sequence
  Synthesized
AQKGLPRPKAQ

SEQ ID NO: 1445 - protein, 11 aa, Artificial Sequence
  Synthesized
AQKGLPSVPAQ

SEQ ID NO: 1446 - protein, 11 aa, Artificial Sequence
  Synthesized
AQKGQLMSNAQ

SEQ ID NO: 1447 - protein, 11 aa, Artificial Sequence
  Synthesized
AQKGRHSAMAQ

SEQ ID NO: 1448 - protein, 11 aa, Artificial Sequence
  Synthesized
AQKGSKTISAQ

SEQ ID NO: 1449 - protein, 11 aa, Artificial Sequence
  Synthesized
AQKGSMSYVAQ

SEQ ID NO: 1450 - protein, 11 aa, Artificial Sequence
  Synthesized
AQKGSPMEKAQ

SEQ ID NO: 1451 - protein, 11 aa, Artificial Sequence
  Synthesized
AQKGTFSFMAQ

SEQ ID NO: 1452 - protein, 11 aa, Artificial Sequence
  Synthesized
AQKGVQSSAAQ

SEQ ID NO: 1453 - protein, 11 aa, Artificial Sequence
  Synthesized
AQKHAESFMAQ

SEQ ID NO: 1454 - protein, 11 aa, Artificial Sequence
  Synthesized
AQKHAKSFMAQ

SEQ ID NO: 1455 - protein, 11 aa, Artificial Sequence
  Synthesized
AQKHASNVAAQ

SEQ ID NO: 1456 - protein, 11 aa, Artificial Sequence
  Synthesized
AQKHFNSHEAQ

SEQ ID NO: 1457 - protein, 11 aa, Artificial Sequence
  Synthesized
AQKHLPHEKAQ

SEQ ID NO: 1458 - protein, 11 aa, Artificial Sequence
  Synthesized
AQKHLPRAIAQ

SEQ ID NO: 1459 - protein, 11 aa, Artificial Sequence
  Synthesized
AQKHLPRQPAQ

SEQ ID NO: 1460 - protein, 11 aa, Artificial Sequence
  Synthesized
AQKHMINTSAQ

SEQ ID NO: 1461 - protein, 11 aa, Artificial Sequence
  Synthesized
AQKIAGGQSAQ

SEQ ID NO: 1462 - protein, 11 aa, Artificial Sequence
  Synthesized
AQKIATLGSAQ

SEQ ID NO: 1463 - protein, 11 aa, Artificial Sequence
  Synthesized
AQKILPRHLAQ

SEQ ID NO: 1464 - protein, 11 aa, Artificial Sequence
  Synthesized
AQKISQHLTAQ

SEQ ID NO: 1465 - protein, 11 aa, Artificial Sequence
  Synthesized
AQKKENTLMAQ

SEQ ID NO: 1466 - protein, 11 aa, Artificial Sequence
  Synthesized
AQKKERDKDAQ

SEQ ID NO: 1467 - protein, 11 aa, Artificial Sequence
  Synthesized
AQKKKTSAMAQ

SEQ ID NO: 1468 - protein, 11 aa, Artificial Sequence
  Synthesized
AQKKLPFTYAQ

SEQ ID NO: 1469 - protein, 11 aa, Artificial Sequence
  Synthesized
AQKKLPPLVAQ

SEQ ID NO: 1470 - protein, 11 aa, Artificial Sequence
  Synthesized
AQKKLPQGLAQ

SEQ ID NO: 1471 - protein, 11 aa, Artificial Sequence
  Synthesized
AQKKLPRIYAQ

SEQ ID NO: 1472 - protein, 11 aa, Artificial Sequence
  Synthesized
AQKKLPRPKAQ

SEQ ID NO: 1473 - protein, 11 aa, Artificial Sequence
  Synthesized
AQKKLPRPYAQ

SEQ ID NO: 1474 - protein, 11 aa, Artificial Sequence
  Synthesized
AQKKPFSFMAQ

SEQ ID NO: 1475 - protein, 11 aa, Artificial Sequence
  Synthesized
AQKKPKSFMAQ

SEQ ID NO: 1476 - protein, 11 aa, Artificial Sequence
  Synthesized
AQKLGGSFMAQ

SEQ ID NO: 1477 - protein, 11 aa, Artificial Sequence
  Synthesized
AQKLGNRDTAQ

SEQ ID NO: 1478 - protein, 11 aa, Artificial Sequence
  Synthesized
AQKLGSAQPAQ

SEQ ID NO: 1479 - protein, 11 aa, Artificial Sequence
  Synthesized
AQKLLDHHSAQ

SEQ ID NO: 1480 - protein, 11 aa, Artificial Sequence
  Synthesized
AQKLLPRYDAQ

SEQ ID NO: 1481 - protein, 11 aa, Artificial Sequence
  Synthesized
AQKLLPYPPAQ

SEQ ID NO: 1482 - protein, 11 aa, Artificial Sequence
  Synthesized
AQKLLSSPLAQ

SEQ ID NO: 1483 - protein, 11 aa, Artificial Sequence
  Synthesized
AQKLLVNSTAQ

SEQ ID NO: 1484 - protein, 11 aa, Artificial Sequence
  Synthesized
AQKLNVTTAAQ

SEQ ID NO: 1485 - protein, 11 aa, Artificial Sequence
  Synthesized
AQKLRTETTAQ

SEQ ID NO: 1486 - protein, 11 aa, Artificial Sequence
  Synthesized
AQKLSHNVSAQ

SEQ ID NO: 1487 - protein, 11 aa, Artificial Sequence
  Synthesized
AQKLSTASTAQ

SEQ ID NO: 1488 - protein, 11 aa, Artificial Sequence
  Synthesized
AQKLSTEKNAQ

SEQ ID NO: 1489 - protein, 11 aa, Artificial Sequence
  Synthesized
AQKLTGITTAQ

SEQ ID NO: 1490 - protein, 11 aa, Artificial Sequence
  Synthesized
AQKLTNPYAAQ

SEQ ID NO: 1491 - protein, 11 aa, Artificial Sequence
  Synthesized
AQKLVVPKDAQ

SEQ ID NO: 1492 - protein, 11 aa, Artificial Sequence
  Synthesized
AQKMAPQLTAQ

SEQ ID NO: 1493 - protein, 11 aa, Artificial Sequence
  Synthesized
AQKMERLSPAQ

SEQ ID NO: 1494 - protein, 11 aa, Artificial Sequence
  Synthesized
AQKMIGGSQAQ

SEQ ID NO: 1495 - protein, 11 aa, Artificial Sequence
  Synthesized
AQKMQTSPLAQ

SEQ ID NO: 1496 - protein, 11 aa, Artificial Sequence
  Synthesized
AQKMTLVSAAQ

SEQ ID NO: 1497 - protein, 11 aa, Artificial Sequence
  Synthesized
AQKMTTTGDAQ

SEQ ID NO: 1498 - protein, 11 aa, Artificial Sequence
  Synthesized
AQKNATRHNAQ

SEQ ID NO: 1499 - protein, 11 aa, Artificial Sequence
  Synthesized
AQKNCSYTVAQ

SEQ ID NO: 1500 - protein, 11 aa, Artificial Sequence
  Synthesized
AQKNFTRYSAQ

SEQ ID NO: 1501 - protein, 11 aa, Artificial Sequence
  Synthesized
AQKNGTRGLAQ

SEQ ID NO: 1502 - protein, 11 aa, Artificial Sequence
  Synthesized
AQKNGTRQQAQ

SEQ ID NO: 1503 - protein, 11 aa, Artificial Sequence
  Synthesized
AQKNHGDLPAQ

SEQ ID NO: 1504 - protein, 11 aa, Artificial Sequence
  Synthesized
AQKNHTRGKAQ

SEQ ID NO: 1505 - protein, 11 aa, Artificial Sequence
  Synthesized
AQKNHTRPGAQ

SEQ ID NO: 1506 - protein, 11 aa, Artificial Sequence
  Synthesized
AQKNHTRYSAQ

SEQ ID NO: 1507 - protein, 11 aa, Artificial Sequence
  Synthesized
AQKNITRHEAQ

SEQ ID NO: 1508 - protein, 11 aa, Artificial Sequence
  Synthesized
AQKNITRHGAQ

SEQ ID NO: 1509 - protein, 11 aa, Artificial Sequence
  Synthesized
AQKNKTRRKAQ

SEQ ID NO: 1510 - protein, 11 aa, Artificial Sequence
  Synthesized
AQKNLDPVTAQ

SEQ ID NO: 1511 - protein, 11 aa, Artificial Sequence
  Synthesized
AQKNLPTIIAQ

SEQ ID NO: 1512 - protein, 11 aa, Artificial Sequence
  Synthesized
AQKNMTRYGAQ

SEQ ID NO: 1513 - protein, 11 aa, Artificial Sequence
  Synthesized
AQKNNAAPAAQ

SEQ ID NO: 1514 - protein, 11 aa, Artificial Sequence
  Synthesized
AQKNNTEEHAQ

SEQ ID NO: 1515 - protein, 11 aa, Artificial Sequence
  Synthesized
AQKNNTGEYAQ

SEQ ID NO: 1516 - protein, 11 aa, Artificial Sequence
  Synthesized
AQKNNTHKAAQ

SEQ ID NO: 1517 - protein, 11 aa, Artificial Sequence
  Synthesized
AQKNNTHTPAQ

SEQ ID NO: 1518 - protein, 11 aa, Artificial Sequence
  Synthesized
AQKNNTNDLAQ

SEQ ID NO: 1519 - protein, 11 aa, Artificial Sequence
  Synthesized
AQKNNTQSKAQ

SEQ ID NO: 1520 - protein, 11 aa, Artificial Sequence
  Synthesized
AQKNNTRKLAQ

SEQ ID NO: 1521 - protein, 11 aa, Artificial Sequence
  Synthesized
AQKNNTTYMAQ

SEQ ID NO: 1522 - protein, 11 aa, Artificial Sequence
  Synthesized
AQKNNTVKRAQ

SEQ ID NO: 1523 - protein, 11 aa, Artificial Sequence
  Synthesized
AQKNNTYFIAQ

SEQ ID NO: 1524 - protein, 11 aa, Artificial Sequence
  Synthesized
AQKNNTYYHAQ

SEQ ID NO: 1525 - protein, 11 aa, Artificial Sequence
  Synthesized
AQKNPFKFSAQ

SEQ ID NO: 1526 - protein, 11 aa, Artificial Sequence
  Synthesized
AQKNPHRFSAQ

SEQ ID NO: 1527 - protein, 11 aa, Artificial Sequence
  Synthesized
AQKNPHYPSAQ

SEQ ID NO: 1528 - protein, 11 aa, Artificial Sequence
  Synthesized
AQKNPKGHSAQ

SEQ ID NO: 1529 - protein, 11 aa, Artificial Sequence
  Synthesized
AQKNPMRNSAQ

SEQ ID NO: 1530 - protein, 11 aa, Artificial Sequence
  Synthesized
AQKNPRHPSAQ

SEQ ID NO: 1531 - protein, 11 aa, Artificial Sequence
  Synthesized
AQKNPTLNSAQ

SEQ ID NO: 1532 - protein, 11 aa, Artificial Sequence
  Synthesized
AQKNPVARSAQ

SEQ ID NO: 1533 - protein, 11 aa, Artificial Sequence
  Synthesized
AQKNPVGDSAQ

SEQ ID NO: 1534 - protein, 11 aa, Artificial Sequence
  Synthesized
AQKNPVGRSAQ

SEQ ID NO: 1535 - protein, 11 aa, Artificial Sequence
  Synthesized
AQKNPVHRSAQ

SEQ ID NO: 1536 - protein, 11 aa, Artificial Sequence
  Synthesized
AQKNPVKRSAQ

SEQ ID NO: 1537 - protein, 11 aa, Artificial Sequence
  Synthesized
AQKNPVMRSAQ

SEQ ID NO: 1538 - protein, 11 aa, Artificial Sequence
  Synthesized
AQKNPVQRSAQ

SEQ ID NO: 1539 - protein, 11 aa, Artificial Sequence
  Synthesized
AQKNPVYRSAQ

SEQ ID NO: 1540 - protein, 11 aa, Artificial Sequence
  Synthesized
AQKNQTRPFAQ

SEQ ID NO: 1541 - protein, 11 aa, Artificial Sequence
  Synthesized
AQKNSTRGYAQ

SEQ ID NO: 1542 - protein, 11 aa, Artificial Sequence
  Synthesized
AQKNTTRYRAQ

SEQ ID NO: 1543 - protein, 11 aa, Artificial Sequence
  Synthesized
AQKNVTRASAQ

SEQ ID NO: 1544 - protein, 11 aa, Artificial Sequence
  Synthesized
AQKPAAGHTAQ

SEQ ID NO: 1545 - protein, 11 aa, Artificial Sequence
  Synthesized
AQKPEALSSAQ

SEQ ID NO: 1546 - protein, 11 aa, Artificial Sequence
  Synthesized
AQKPLDVNHAQ

SEQ ID NO: 1547 - protein, 11 aa, Artificial Sequence
  Synthesized
AQKPLPGNHAQ

SEQ ID NO: 1548 - protein, 11 aa, Artificial Sequence
  Synthesized
AQKPLPRVYAQ

SEQ ID NO: 1549 - protein, 11 aa, Artificial Sequence
  Synthesized
AQKPLYSFMAQ

SEQ ID NO: 1550 - protein, 11 aa, Artificial Sequence
  Synthesized
AQKPPLMSQAQ

SEQ ID NO: 1551 - protein, 11 aa, Artificial Sequence
  Synthesized
AQKPPPSFMAQ

SEQ ID NO: 1552 - protein, 11 aa, Artificial Sequence
  Synthesized
AQKPPSLIDAQ

SEQ ID NO: 1553 - protein, 11 aa, Artificial Sequence
  Synthesized
AQKPQTNPTAQ

SEQ ID NO: 1554 - protein, 11 aa, Artificial Sequence
  Synthesized
AQKPSVPNVAQ

SEQ ID NO: 1555 - protein, 11 aa, Artificial Sequence
  Synthesized
AQKPTMDVKAQ

SEQ ID NO: 1556 - protein, 11 aa, Artificial Sequence
  Synthesized
AQKPVSLSAAQ

SEQ ID NO: 1557 - protein, 11 aa, Artificial Sequence
  Synthesized
AQKQLPHYYAQ

SEQ ID NO: 1558 - protein, 11 aa, Artificial Sequence
  Synthesized
AQKQLPRYKAQ

SEQ ID NO: 1559 - protein, 11 aa, Artificial Sequence
  Synthesized
AQKQLTGTIAQ

SEQ ID NO: 1560 - protein, 11 aa, Artificial Sequence
  Synthesized
AQKQNDVGSAQ

SEQ ID NO: 1561 - protein, 11 aa, Artificial Sequence
  Synthesized
AQKQPPGLGAQ

SEQ ID NO: 1562 - protein, 11 aa, Artificial Sequence
  Synthesized
AQKQRDLSAAQ

SEQ ID NO: 1563 - protein, 11 aa, Artificial Sequence
  Synthesized
AQKQSDLNRAQ

SEQ ID NO: 1564 - protein, 11 aa, Artificial Sequence
  Synthesized
AQKQSVSLTAQ

SEQ ID NO: 1565 - protein, 11 aa, Artificial Sequence
  Synthesized
AQKQYQQHVAQ

SEQ ID NO: 1566 - protein, 11 aa, Artificial Sequence
  Synthesized
AQKRAQSFMAQ

SEQ ID NO: 1567 - protein, 11 aa, Artificial Sequence
  Synthesized
AQKRLPVSDAQ

SEQ ID NO: 1568 - protein, 11 aa, Artificial Sequence
  Synthesized
AQKRPVPAEAQ

SEQ ID NO: 1569 - protein, 11 aa, Artificial Sequence
  Synthesized
AQKSALRSGAQ

SEQ ID NO: 1570 - protein, 11 aa, Artificial Sequence
  Synthesized
AQKSEHAEVAQ

SEQ ID NO: 1571 - protein, 11 aa, Artificial Sequence
  Synthesized
AQKSEMGHRAQ

SEQ ID NO: 1572 - protein, 11 aa, Artificial Sequence
  Synthesized
AQKSGIVSAAQ

SEQ ID NO: 1573 - protein, 11 aa, Artificial Sequence
  Synthesized
AQKSGQPGPAQ

SEQ ID NO: 1574 - protein, 11 aa, Artificial Sequence
  Synthesized
AQKSHSPGVAQ

SEQ ID NO: 1575 - protein, 11 aa, Artificial Sequence
  Synthesized
AQKSINPNPAQ

SEQ ID NO: 1576 - protein, 11 aa, Artificial Sequence
  Synthesized
AQKSKGDAAAQ

SEQ ID NO: 1577 - protein, 11 aa, Artificial Sequence
  Synthesized
AQKSLDREKAQ

SEQ ID NO: 1578 - protein, 11 aa, Artificial Sequence
  Synthesized
AQKSLPHFRAQ

SEQ ID NO: 1579 - protein, 11 aa, Artificial Sequence
  Synthesized
AQKSLPLDVAQ

SEQ ID NO: 1580 - protein, 11 aa, Artificial Sequence
  Synthesized
AQKSLPRMHAQ

SEQ ID NO: 1581 - protein, 11 aa, Artificial Sequence
  Synthesized
AQKSLRDQSAQ

SEQ ID NO: 1582 - protein, 11 aa, Artificial Sequence
  Synthesized
AQKSLTDVTAQ

SEQ ID NO: 1583 - protein, 11 aa, Artificial Sequence
  Synthesized
AQKSMTIPQAQ

SEQ ID NO: 1584 - protein, 11 aa, Artificial Sequence
  Synthesized
AQKSNLSSQAQ

SEQ ID NO: 1585 - protein, 11 aa, Artificial Sequence
  Synthesized
AQKSNMQNTAQ

SEQ ID NO: 1586 - protein, 11 aa, Artificial Sequence
  Synthesized
AQKSNSQYTAQ

SEQ ID NO: 1587 - protein, 11 aa, Artificial Sequence
  Synthesized
AQKSQPLSYAQ

SEQ ID NO: 1588 - protein, 11 aa, Artificial Sequence
  Synthesized
AQKSQSLAGAQ

SEQ ID NO: 1589 - protein, 11 aa, Artificial Sequence
  Synthesized
AQKSSALNQAQ

SEQ ID NO: 1590 - protein, 11 aa, Artificial Sequence
  Synthesized
AQKSSPGQPAQ

SEQ ID NO: 1591 - protein, 11 aa, Artificial Sequence
  Synthesized
AQKSTTTGRAQ

SEQ ID NO: 1592 - protein, 11 aa, Artificial Sequence
  Synthesized
AQKSTYLGMAQ

SEQ ID NO: 1593 - protein, 11 aa, Artificial Sequence
  Synthesized
AQKTAVGANAQ

SEQ ID NO: 1594 - protein, 11 aa, Artificial Sequence
  Synthesized
AQKTGHVMPAQ

SEQ ID NO: 1595 - protein, 11 aa, Artificial Sequence
  Synthesized
AQKTGTSMNAQ

SEQ ID NO: 1596 - protein, 11 aa, Artificial Sequence
  Synthesized
AQKTGYSSLAQ

SEQ ID NO: 1597 - protein, 11 aa, Artificial Sequence
  Synthesized
AQKTLPRKHAQ

SEQ ID NO: 1598 - protein, 11 aa, Artificial Sequence
  Synthesized
AQKTMSAPAAQ

SEQ ID NO: 1599 - protein, 11 aa, Artificial Sequence
  Synthesized
AQKTNPSFMAQ

SEQ ID NO: 1600 - protein, 11 aa, Artificial Sequence
  Synthesized
AQKTPESSRAQ

SEQ ID NO: 1601 - protein, 11 aa, Artificial Sequence
  Synthesized
AQKTPNSFMAQ

SEQ ID NO: 1602 - protein, 11 aa, Artificial Sequence
  Synthesized
AQKTTNHSSAQ

SEQ ID NO: 1603 - protein, 11 aa, Artificial Sequence
  Synthesized
AQKTTSAPLAQ

SEQ ID NO: 1604 - protein, 11 aa, Artificial Sequence
  Synthesized
AQKTYGATNAQ

SEQ ID NO: 1605 - protein, 11 aa, Artificial Sequence
  Synthesized
AQKVDADLLAQ

SEQ ID NO: 1606 - protein, 11 aa, Artificial Sequence
  Synthesized
AQKVGALSVAQ

SEQ ID NO: 1607 - protein, 11 aa, Artificial Sequence
  Synthesized
AQKVGTHTSAQ

SEQ ID NO: 1608 - protein, 11 aa, Artificial Sequence
  Synthesized
AQKVNPSPTAQ

SEQ ID NO: 1609 - protein, 11 aa, Artificial Sequence
  Synthesized
AQKVPGFGSAQ

SEQ ID NO: 1610 - protein, 11 aa, Artificial Sequence
  Synthesized
AQKVQRSFMAQ

SEQ ID NO: 1611 - protein, 11 aa, Artificial Sequence
  Synthesized
AQKVQVSSAAQ

SEQ ID NO: 1612 - protein, 11 aa, Artificial Sequence
  Synthesized
AQKVSSVGPAQ

SEQ ID NO: 1613 - protein, 11 aa, Artificial Sequence
  Synthesized
AQKVTAMNAAQ

SEQ ID NO: 1614 - protein, 11 aa, Artificial Sequence
  Synthesized
AQKVTGTYSAQ

SEQ ID NO: 1615 - protein, 11 aa, Artificial Sequence
  Synthesized
AQKYHESFMAQ

SEQ ID NO: 1616 - protein, 11 aa, Artificial Sequence
  Synthesized
AQKYLPIVEAQ

SEQ ID NO: 1617 - protein, 11 aa, Artificial Sequence
  Synthesized
AQKYLPRLEAQ

SEQ ID NO: 1618 - protein, 11 aa, Artificial Sequence
  Synthesized
AQKYPGSFMAQ

SEQ ID NO: 1619 - protein, 11 aa, Artificial Sequence
  Synthesized
AQKYQQNSSAQ

SEQ ID NO: 1620 - protein, 11 aa, Artificial Sequence
  Synthesized
AQLAAMLTSAQ

SEQ ID NO: 1621 - protein, 11 aa, Artificial Sequence
  Synthesized
AQLAANNRNAQ

SEQ ID NO: 1622 - protein, 11 aa, Artificial Sequence
  Synthesized
AQLAAQMNKAQ

SEQ ID NO: 1623 - protein, 11 aa, Artificial Sequence
  Synthesized
AQLAASNSPAQ

SEQ ID NO: 1624 - protein, 11 aa, Artificial Sequence
  Synthesized
AQLADASRYAQ

SEQ ID NO: 1625 - protein, 11 aa, Artificial Sequence
  Synthesized
AQLADHRMMAQ

SEQ ID NO: 1626 - protein, 11 aa, Artificial Sequence
  Synthesized
AQLADKKITAQ

SEQ ID NO: 1627 - protein, 11 aa, Artificial Sequence
  Synthesized
AQLAGQVRVAQ

SEQ ID NO: 1628 - protein, 11 aa, Artificial Sequence
  Synthesized
AQLAGSNTLAQ

SEQ ID NO: 1629 - protein, 11 aa, Artificial Sequence
  Synthesized
AQLAKNVPTAQ

SEQ ID NO: 1630 - protein, 11 aa, Artificial Sequence
  Synthesized
AQLAKTSQTAQ

SEQ ID NO: 1631 - protein, 11 aa, Artificial Sequence
  Synthesized
AQLALSTKSAQ

SEQ ID NO: 1632 - protein, 11 aa, Artificial Sequence
  Synthesized
AQLANRSLDAQ

SEQ ID NO: 1633 - protein, 11 aa, Artificial Sequence
  Synthesized
AQLAPSETSAQ

SEQ ID NO: 1634 - protein, 11 aa, Artificial Sequence
  Synthesized
AQLARHESSAQ

SEQ ID NO: 1635 - protein, 11 aa, Artificial Sequence
  Synthesized
AQLARHPSIAQ

SEQ ID NO: 1636 - protein, 11 aa, Artificial Sequence
  Synthesized
AQLARNQSDAQ

SEQ ID NO: 1637 - protein, 11 aa, Artificial Sequence
  Synthesized
AQLARPLANAQ

SEQ ID NO: 1638 - protein, 11 aa, Artificial Sequence
  Synthesized
AQLARSVAAAQ

SEQ ID NO: 1639 - protein, 11 aa, Artificial Sequence
  Synthesized
AQLARTTTDAQ

SEQ ID NO: 1640 - protein, 11 aa, Artificial Sequence
  Synthesized
AQLASGPKNAQ

SEQ ID NO: 1641 - protein, 11 aa, Artificial Sequence
  Synthesized
AQLASPRDRAQ

SEQ ID NO: 1642 - protein, 11 aa, Artificial Sequence
  Synthesized
AQLASRDAMAQ

SEQ ID NO: 1643 - protein, 11 aa, Artificial Sequence
  Synthesized
AQLASRPTLAQ

SEQ ID NO: 1644 - protein, 11 aa, Artificial Sequence
  Synthesized
AQLASSGVLAQ

SEQ ID NO: 1645 - protein, 11 aa, Artificial Sequence
  Synthesized
AQLASSLNVAQ

SEQ ID NO: 1646 - protein, 11 aa, Artificial Sequence
  Synthesized
AQLASSMHSAQ

SEQ ID NO: 1647 - protein, 11 aa, Artificial Sequence
  Synthesized
AQLATAGIIAQ

SEQ ID NO: 1648 - protein, 11 aa, Artificial Sequence
  Synthesized
AQLATRGAPAQ

SEQ ID NO: 1649 - protein, 11 aa, Artificial Sequence
  Synthesized
AQLAVVATVAQ

SEQ ID NO: 1650 - protein, 11 aa, Artificial Sequence
  Synthesized
AQLDKYRSNAQ

SEQ ID NO: 1651 - protein, 11 aa, Artificial Sequence
  Synthesized
AQLDSKRPSAQ

SEQ ID NO: 1652 - protein, 11 aa, Artificial Sequence
  Synthesized
AQLDSKRTYAQ

SEQ ID NO: 1653 - protein, 11 aa, Artificial Sequence
  Synthesized
AQLDSQMAVAQ

SEQ ID NO: 1654 - protein, 11 aa, Artificial Sequence
  Synthesized
AQLEEQKQEAQ

SEQ ID NO: 1655 - protein, 11 aa, Artificial Sequence
  Synthesized
AQLEFRSFMAQ

SEQ ID NO: 1656 - protein, 11 aa, Artificial Sequence
  Synthesized
AQLEHPNRLAQ

SEQ ID NO: 1657 - protein, 11 aa, Artificial Sequence
  Synthesized
AQLELPRFFAQ

SEQ ID NO: 1658 - protein, 11 aa, Artificial Sequence
  Synthesized
AQLELPRFRAQ

SEQ ID NO: 1659 - protein, 11 aa, Artificial Sequence
  Synthesized
AQLEMKTTLAQ

SEQ ID NO: 1660 - protein, 11 aa, Artificial Sequence
  Synthesized
AQLERPTINAQ

SEQ ID NO: 1661 - protein, 11 aa, Artificial Sequence
  Synthesized
AQLERVKQTAQ

SEQ ID NO: 1662 - protein, 11 aa, Artificial Sequence
  Synthesized
AQLFEVRTTAQ

SEQ ID NO: 1663 - protein, 11 aa, Artificial Sequence
  Synthesized
AQLFLPPPPAQ

SEQ ID NO: 1664 - protein, 11 aa, Artificial Sequence
  Synthesized
AQLFSNTQNAQ

SEQ ID NO: 1665 - protein, 11 aa, Artificial Sequence
  Synthesized
AQLGASVRNAQ

SEQ ID NO: 1666 - protein, 11 aa, Artificial Sequence
  Synthesized
AQLGDLIRSAQ

SEQ ID NO: 1667 - protein, 11 aa, Artificial Sequence
  Synthesized
AQLGGLRSVAQ

SEQ ID NO: 1668 - protein, 11 aa, Artificial Sequence
  Synthesized
AQLGGRSAMAQ

SEQ ID NO: 1669 - protein, 11 aa, Artificial Sequence
  Synthesized
AQLGGYSSTAQ

SEQ ID NO: 1670 - protein, 11 aa, Artificial Sequence
  Synthesized
AQLGHSSSLAQ

SEQ ID NO: 1671 - protein, 11 aa, Artificial Sequence
  Synthesized
AQLGIIQGPAQ

SEQ ID NO: 1672 - protein, 11 aa, Artificial Sequence
  Synthesized
AQLGINLIQAQ

SEQ ID NO: 1673 - protein, 11 aa, Artificial Sequence
  Synthesized
AQLGISNVVAQ

SEQ ID NO: 1674 - protein, 11 aa, Artificial Sequence
  Synthesized
AQLGKAINVAQ

SEQ ID NO: 1675 - protein, 11 aa, Artificial Sequence
  Synthesized
AQLGKFNQDAQ

SEQ ID NO: 1676 - protein, 11 aa, Artificial Sequence
  Synthesized
AQLGLERNTAQ

SEQ ID NO: 1677 - protein, 11 aa, Artificial Sequence
  Synthesized
AQLGLPRPGAQ

SEQ ID NO: 1678 - protein, 11 aa, Artificial Sequence
  Synthesized
AQLGLSITAAQ

SEQ ID NO: 1679 - protein, 11 aa, Artificial Sequence
  Synthesized
AQLGNEKMVAQ

SEQ ID NO: 1680 - protein, 11 aa, Artificial Sequence
  Synthesized
AQLGNRFLSAQ

SEQ ID NO: 1681 - protein, 11 aa, Artificial Sequence
  Synthesized
AQLGPSSPRAQ

SEQ ID NO: 1682 - protein, 11 aa, Artificial Sequence
  Synthesized
AQLGQHTSRAQ

SEQ ID NO: 1683 - protein, 11 aa, Artificial Sequence
  Synthesized
AQLGRDKSTAQ

SEQ ID NO: 1684 - protein, 11 aa, Artificial Sequence
  Synthesized
AQLGRLNQDAQ

SEQ ID NO: 1685 - protein, 11 aa, Artificial Sequence
  Synthesized
AQLGRNAVPAQ

SEQ ID NO: 1686 - protein, 11 aa, Artificial Sequence
  Synthesized
AQLGRSDLSAQ

SEQ ID NO: 1687 - protein, 11 aa, Artificial Sequence
  Synthesized
AQLGRTALNAQ

SEQ ID NO: 1688 - protein, 11 aa, Artificial Sequence
  Synthesized
AQLGSDEGMAQ

SEQ ID NO: 1689 - protein, 11 aa, Artificial Sequence
  Synthesized
AQLGSLSEKAQ

SEQ ID NO: 1690 - protein, 11 aa, Artificial Sequence
  Synthesized
AQLGSQSLQAQ

SEQ ID NO: 1691 - protein, 11 aa, Artificial Sequence
  Synthesized
AQLGSRNITAQ

SEQ ID NO: 1692 - protein, 11 aa, Artificial Sequence
  Synthesized
AQLGTNQQRAQ

SEQ ID NO: 1693 - protein, 11 aa, Artificial Sequence
  Synthesized
AQLGTRSGSAQ

SEQ ID NO: 1694 - protein, 11 aa, Artificial Sequence
  Synthesized
AQLGVVDGDAQ

SEQ ID NO: 1695 - protein, 11 aa, Artificial Sequence
  Synthesized
AQLHFGSFMAQ

SEQ ID NO: 1696 - protein, 11 aa, Artificial Sequence
  Synthesized
AQLHFHSAMAQ

SEQ ID NO: 1697 - protein, 11 aa, Artificial Sequence
  Synthesized
AQLHGTTNMAQ

SEQ ID NO: 1698 - protein, 11 aa, Artificial Sequence
  Synthesized
AQLHLPAYPAQ

SEQ ID NO: 1699 - protein, 11 aa, Artificial Sequence
  Synthesized
AQLHNPRNSAQ

SEQ ID NO: 1700 - protein, 11 aa, Artificial Sequence
  Synthesized
AQLHQTRGVAQ

SEQ ID NO: 1701 - protein, 11 aa, Artificial Sequence
  Synthesized
AQLHRTSSPAQ

SEQ ID NO: 1702 - protein, 11 aa, Artificial Sequence
  Synthesized
AQLHSAVSSAQ

SEQ ID NO: 1703 - protein, 11 aa, Artificial Sequence
  Synthesized
AQLHSGSAMAQ

SEQ ID NO: 1704 - protein, 11 aa, Artificial Sequence
  Synthesized
AQLHSRPSTAQ

SEQ ID NO: 1705 - protein, 11 aa, Artificial Sequence
  Synthesized
AQLHTPGNRAQ

SEQ ID NO: 1706 - protein, 11 aa, Artificial Sequence
  Synthesized
AQLHTSPNKAQ

SEQ ID NO: 1707 - protein, 11 aa, Artificial Sequence
  Synthesized
AQLIATQDRAQ

SEQ ID NO: 1708 - protein, 11 aa, Artificial Sequence
  Synthesized
AQLIPMTTAAQ

SEQ ID NO: 1709 - protein, 11 aa, Artificial Sequence
  Synthesized
AQLITHNSSAQ

SEQ ID NO: 1710 - protein, 11 aa, Artificial Sequence
  Synthesized
AQLITNKANAQ

SEQ ID NO: 1711 - protein, 11 aa, Artificial Sequence
  Synthesized
AQLKAGSVTAQ

SEQ ID NO: 1712 - protein, 11 aa, Artificial Sequence
  Synthesized
AQLKARPLDAQ

SEQ ID NO: 1713 - protein, 11 aa, Artificial Sequence
  Synthesized
AQLKEASMKAQ

SEQ ID NO: 1714 - protein, 11 aa, Artificial Sequence
  Synthesized
AQLKEKSLQAQ

SEQ ID NO: 1715 - protein, 11 aa, Artificial Sequence
  Synthesized
AQLKGTANNAQ

SEQ ID NO: 1716 - protein, 11 aa, Artificial Sequence
  Synthesized
AQLKGTPSLAQ

SEQ ID NO: 1717 - protein, 11 aa, Artificial Sequence
  Synthesized
AQLKGVIHDAQ

SEQ ID NO: 1718 - protein, 11 aa, Artificial Sequence
  Synthesized
AQLKHPASLAQ

SEQ ID NO: 1719 - protein, 11 aa, Artificial Sequence
  Synthesized
AQLKLESTTAQ

SEQ ID NO: 1720 - protein, 11 aa, Artificial Sequence
  Synthesized
AQLKLPRHGAQ

SEQ ID NO: 1721 - protein, 11 aa, Artificial Sequence
  Synthesized
AQLKNAVNNAQ

SEQ ID NO: 1722 - protein, 11 aa, Artificial Sequence
  Synthesized
AQLKNITLQAQ

SEQ ID NO: 1723 - protein, 11 aa, Artificial Sequence
  Synthesized
AQLKNQTMSAQ

SEQ ID NO: 1724 - protein, 11 aa, Artificial Sequence
  Synthesized
AQLKPVNLGAQ

SEQ ID NO: 1725 - protein, 11 aa, Artificial Sequence
  Synthesized
AQLKSGLSNAQ

SEQ ID NO: 1726 - protein, 11 aa, Artificial Sequence
  Synthesized
AQLKSTGAPAQ

SEQ ID NO: 1727 - protein, 11 aa, Artificial Sequence
  Synthesized
AQLKTAHFSAQ

SEQ ID NO: 1728 - protein, 11 aa, Artificial Sequence
  Synthesized
AQLKTMSPNAQ

SEQ ID NO: 1729 - protein, 11 aa, Artificial Sequence
  Synthesized
AQLKTNSMPAQ

SEQ ID NO: 1730 - protein, 11 aa, Artificial Sequence
  Synthesized
AQLKTTKISAQ

SEQ ID NO: 1731 - protein, 11 aa, Artificial Sequence
  Synthesized
AQLKTVLEKAQ

SEQ ID NO: 1732 - protein, 11 aa, Artificial Sequence
  Synthesized
AQLLGRSNPAQ

SEQ ID NO: 1733 - protein, 11 aa, Artificial Sequence
  Synthesized
AQLLHQSFMAQ

SEQ ID NO: 1734 - protein, 11 aa, Artificial Sequence
  Synthesized
AQLLKAGVTAQ

SEQ ID NO: 1735 - protein, 11 aa, Artificial Sequence
  Synthesized
AQLLKEVADAQ

SEQ ID NO: 1736 - protein, 11 aa, Artificial Sequence
  Synthesized
AQLLPHALSAQ

SEQ ID NO: 1737 - protein, 11 aa, Artificial Sequence
  Synthesized
AQLLPNMRGAQ

SEQ ID NO: 1738 - protein, 11 aa, Artificial Sequence
  Synthesized
AQLLPPHQAAQ

SEQ ID NO: 1739 - protein, 11 aa, Artificial Sequence
  Synthesized
AQLLQATDIAQ

SEQ ID NO: 1740 - protein, 11 aa, Artificial Sequence
  Synthesized
AQLLRKDATAQ

SEQ ID NO: 1741 - protein, 11 aa, Artificial Sequence
  Synthesized
AQLLSGKAQAQ

SEQ ID NO: 1742 - protein, 11 aa, Artificial Sequence
  Synthesized
AQLLSKTDYAQ

SEQ ID NO: 1743 - protein, 11 aa, Artificial Sequence
  Synthesized
AQLLSTSNRAQ

SEQ ID NO: 1744 - protein, 11 aa, Artificial Sequence
  Synthesized
AQLLTATTDAQ

SEQ ID NO: 1745 - protein, 11 aa, Artificial Sequence
  Synthesized
AQLLTDKTSAQ

SEQ ID NO: 1746 - protein, 11 aa, Artificial Sequence
  Synthesized
AQLLYGQTNAQ

SEQ ID NO: 1747 - protein, 11 aa, Artificial Sequence
  Synthesized
AQLMDAADNAQ

SEQ ID NO: 1748 - protein, 11 aa, Artificial Sequence
  Synthesized
AQLMGQRTSAQ

SEQ ID NO: 1749 - protein, 11 aa, Artificial Sequence
  Synthesized
AQLMLPRPHAQ

SEQ ID NO: 1750 - protein, 11 aa, Artificial Sequence
  Synthesized
AQLMMRSVDAQ

SEQ ID NO: 1751 - protein, 11 aa, Artificial Sequence
  Synthesized
AQLMQVKDHAQ

SEQ ID NO: 1752 - protein, 11 aa, Artificial Sequence
  Synthesized
AQLMRPDSLAQ

SEQ ID NO: 1753 - protein, 11 aa, Artificial Sequence
  Synthesized
AQLNASSSIAQ

SEQ ID NO: 1754 - protein, 11 aa, Artificial Sequence
  Synthesized
AQLNDRAVSAQ

SEQ ID NO: 1755 - protein, 11 aa, Artificial Sequence
  Synthesized
AQLNDTRNRAQ

SEQ ID NO: 1756 - protein, 11 aa, Artificial Sequence
  Synthesized
AQLNETRNTAQ

SEQ ID NO: 1757 - protein, 11 aa, Artificial Sequence
  Synthesized
AQLNGHNMLAQ

SEQ ID NO: 1758 - protein, 11 aa, Artificial Sequence
  Synthesized
AQLNGTRLMAQ

SEQ ID NO: 1759 - protein, 11 aa, Artificial Sequence
  Synthesized
AQLNHATRGAQ

SEQ ID NO: 1760 - protein, 11 aa, Artificial Sequence
  Synthesized
AQLNHTKQTAQ

SEQ ID NO: 1761 - protein, 11 aa, Artificial Sequence
  Synthesized
AQLNHTRMSAQ

SEQ ID NO: 1762 - protein, 11 aa, Artificial Sequence
  Synthesized
AQLNHTRPGAQ

SEQ ID NO: 1763 - protein, 11 aa, Artificial Sequence
  Synthesized
AQLNHTRRTAQ

SEQ ID NO: 1764 - protein, 11 aa, Artificial Sequence
  Synthesized
AQLNLPFHPAQ

SEQ ID NO: 1765 - protein, 11 aa, Artificial Sequence
  Synthesized
AQLNMTRHRAQ

SEQ ID NO: 1766 - protein, 11 aa, Artificial Sequence
  Synthesized
AQLNNRLGAAQ

SEQ ID NO: 1767 - protein, 11 aa, Artificial Sequence
  Synthesized
AQLNNTEFSAQ

SEQ ID NO: 1768 - protein, 11 aa, Artificial Sequence
  Synthesized
AQLNNTHTRAQ

SEQ ID NO: 1769 - protein, 11 aa, Artificial Sequence
  Synthesized
AQLNNTPPPAQ

SEQ ID NO: 1770 - protein, 11 aa, Artificial Sequence
  Synthesized
AQLNNTYHLAQ

SEQ ID NO: 1771 - protein, 11 aa, Artificial Sequence
  Synthesized
AQLNPADISAQ

SEQ ID NO: 1772 - protein, 11 aa, Artificial Sequence
  Synthesized
AQLNPRGANAQ

SEQ ID NO: 1773 - protein, 11 aa, Artificial Sequence
  Synthesized
AQLNPRNGSAQ

SEQ ID NO: 1774 - protein, 11 aa, Artificial Sequence
  Synthesized
AQLNPTRVVAQ

SEQ ID NO: 1775 - protein, 11 aa, Artificial Sequence
  Synthesized
AQLNPTRYYAQ

SEQ ID NO: 1776 - protein, 11 aa, Artificial Sequence
  Synthesized
AQLNPVDRSAQ

SEQ ID NO: 1777 - protein, 11 aa, Artificial Sequence
  Synthesized
AQLNPVGRSAQ

SEQ ID NO: 1778 - protein, 11 aa, Artificial Sequence
  Synthesized
AQLNPVHRSAQ

SEQ ID NO: 1779 - protein, 11 aa, Artificial Sequence
  Synthesized
AQLNPYSAMAQ

SEQ ID NO: 1780 - protein, 11 aa, Artificial Sequence
  Synthesized
AQLNSGPAKAQ

SEQ ID NO: 1781 - protein, 11 aa, Artificial Sequence
  Synthesized
AQLNSLARSAQ

SEQ ID NO: 1782 - protein, 11 aa, Artificial Sequence
  Synthesized
AQLNSSSIIAQ

SEQ ID NO: 1783 - protein, 11 aa, Artificial Sequence
  Synthesized
AQLNSSSNRAQ

SEQ ID NO: 1784 - protein, 11 aa, Artificial Sequence
  Synthesized
AQLNSVRNTAQ

SEQ ID NO: 1785 - protein, 11 aa, Artificial Sequence
  Synthesized
AQLNTTKPIAQ

SEQ ID NO: 1786 - protein, 11 aa, Artificial Sequence
  Synthesized
AQLNTVARSAQ

SEQ ID NO: 1787 - protein, 11 aa, Artificial Sequence
  Synthesized
AQLNTVKGTAQ

SEQ ID NO: 1788 - protein, 11 aa, Artificial Sequence
  Synthesized
AQLNTVKPLAQ

SEQ ID NO: 1789 - protein, 11 aa, Artificial Sequence
  Synthesized
AQLNVTTTRAQ

SEQ ID NO: 1790 - protein, 11 aa, Artificial Sequence
  Synthesized
AQLNYTRQIAQ

SEQ ID NO: 1791 - protein, 11 aa, Artificial Sequence
  Synthesized
AQLPLGGRQAQ

SEQ ID NO: 1792 - protein, 11 aa, Artificial Sequence
  Synthesized
AQLPLPKNRAQ

SEQ ID NO: 1793 - protein, 11 aa, Artificial Sequence
  Synthesized
AQLPNLVLHAQ

SEQ ID NO: 1794 - protein, 11 aa, Artificial Sequence
  Synthesized
AQLPNRTPPAQ

SEQ ID NO: 1795 - protein, 11 aa, Artificial Sequence
  Synthesized
AQLPNSGTLAQ

SEQ ID NO: 1796 - protein, 11 aa, Artificial Sequence
  Synthesized
AQLPPFSFMAQ

SEQ ID NO: 1797 - protein, 11 aa, Artificial Sequence
  Synthesized
AQLPQASRDAQ

SEQ ID NO: 1798 - protein, 11 aa, Artificial Sequence
  Synthesized
AQLPQKSASAQ

SEQ ID NO: 1799 - protein, 11 aa, Artificial Sequence
  Synthesized
AQLPQLSFMAQ

SEQ ID NO: 1800 - protein, 11 aa, Artificial Sequence
  Synthesized
AQLPQNYKDAQ

SEQ ID NO: 1801 - protein, 11 aa, Artificial Sequence
  Synthesized
AQLPQTTSRAQ

SEQ ID NO: 1802 - protein, 11 aa, Artificial Sequence
  Synthesized
AQLPRATSTAQ

SEQ ID NO: 1803 - protein, 11 aa, Artificial Sequence
  Synthesized
AQLPRGDLHAQ

SEQ ID NO: 1804 - protein, 11 aa, Artificial Sequence
  Synthesized
AQLPRLSQDAQ

SEQ ID NO: 1805 - protein, 11 aa, Artificial Sequence
  Synthesized
AQLPRSHNDAQ

SEQ ID NO: 1806 - protein, 11 aa, Artificial Sequence
  Synthesized
AQLPRVSTSAQ

SEQ ID NO: 1807 - protein, 11 aa, Artificial Sequence
  Synthesized
AQLPSGLLTAQ

SEQ ID NO: 1808 - protein, 11 aa, Artificial Sequence
  Synthesized
AQLPSLRGAAQ

SEQ ID NO: 1809 - protein, 11 aa, Artificial Sequence
  Synthesized
AQLPSSSLQAQ

SEQ ID NO: 1810 - protein, 11 aa, Artificial Sequence
  Synthesized
AQLPTLQATAQ

SEQ ID NO: 1811 - protein, 11 aa, Artificial Sequence
  Synthesized
AQLQEANRKAQ

SEQ ID NO: 1812 - protein, 11 aa, Artificial Sequence
  Synthesized
AQLQKPDPAAQ

SEQ ID NO: 1813 - protein, 11 aa, Artificial Sequence
  Synthesized
AQLQLPGLSAQ

SEQ ID NO: 1814 - protein, 11 aa, Artificial Sequence
  Synthesized
AQLQPIQTQAQ

SEQ ID NO: 1815 - protein, 11 aa, Artificial Sequence
  Synthesized
AQLQQPSLYAQ

SEQ ID NO: 1816 - protein, 11 aa, Artificial Sequence
  Synthesized
AQLQRIGANAQ

SEQ ID NO: 1817 - protein, 11 aa, Artificial Sequence
  Synthesized
AQLQRKIEDAQ

SEQ ID NO: 1818 - protein, 11 aa, Artificial Sequence
  Synthesized
AQLQRSPSNAQ

SEQ ID NO: 1819 - protein, 11 aa, Artificial Sequence
  Synthesized
AQLQSKSLDAQ

SEQ ID NO: 1820 - protein, 11 aa, Artificial Sequence
  Synthesized
AQLQSMSSRAQ

SEQ ID NO: 1821 - protein, 11 aa, Artificial Sequence
  Synthesized
AQLQSTKNEAQ

SEQ ID NO: 1822 - protein, 11 aa, Artificial Sequence
  Synthesized
AQLQTNRVTAQ

SEQ ID NO: 1823 - protein, 11 aa, Artificial Sequence
  Synthesized
AQLQTNSHPAQ

SEQ ID NO: 1824 - protein, 11 aa, Artificial Sequence
  Synthesized
AQLQTRDTNAQ

SEQ ID NO: 1825 - protein, 11 aa, Artificial Sequence
  Synthesized
AQLQTSQIKAQ

SEQ ID NO: 1826 - protein, 11 aa, Artificial Sequence
  Synthesized
AQLQVAKTQAQ

SEQ ID NO: 1827 - protein, 11 aa, Artificial Sequence
  Synthesized
AQLQVHTVVAQ

SEQ ID NO: 1828 - protein, 11 aa, Artificial Sequence
  Synthesized
AQLQYGSQKAQ

SEQ ID NO: 1829 - protein, 11 aa, Artificial Sequence
  Synthesized
AQLQYRSQSAQ

SEQ ID NO: 1830 - protein, 11 aa, Artificial Sequence
  Synthesized
AQLRASLGGAQ

SEQ ID NO: 1831 - protein, 11 aa, Artificial Sequence
  Synthesized
AQLRASTVTAQ

SEQ ID NO: 1832 - protein, 11 aa, Artificial Sequence
  Synthesized
AQLRDMNHLAQ

SEQ ID NO: 1833 - protein, 11 aa, Artificial Sequence
  Synthesized
AQLRDSAKVAQ

SEQ ID NO: 1834 - protein, 11 aa, Artificial Sequence
  Synthesized
AQLREGRLTAQ

SEQ ID NO: 1835 - protein, 11 aa, Artificial Sequence
  Synthesized
AQLRELKGSAQ

SEQ ID NO: 1836 - protein, 11 aa, Artificial Sequence
  Synthesized
AQLRGTNPVAQ

SEQ ID NO: 1837 - protein, 11 aa, Artificial Sequence
  Synthesized
AQLRHGPENAQ

SEQ ID NO: 1838 - protein, 11 aa, Artificial Sequence
  Synthesized
AQLRHSMNDAQ

SEQ ID NO: 1839 - protein, 11 aa, Artificial Sequence
  Synthesized
AQLRLPRKNAQ

SEQ ID NO: 1840 - protein, 11 aa, Artificial Sequence
  Synthesized
AQLRLPRMAAQ

SEQ ID NO: 1841 - protein, 11 aa, Artificial Sequence
  Synthesized
AQLRLQVKDAQ

SEQ ID NO: 1842 - protein, 11 aa, Artificial Sequence
  Synthesized
AQLRNVTAGAQ

SEQ ID NO: 1843 - protein, 11 aa, Artificial Sequence
  Synthesized
AQLRPALTEAQ

SEQ ID NO: 1844 - protein, 11 aa, Artificial Sequence
  Synthesized
AQLRPSAMGAQ

SEQ ID NO: 1845 - protein, 11 aa, Artificial Sequence
  Synthesized
AQLRPVSATAQ

SEQ ID NO: 1846 - protein, 11 aa, Artificial Sequence
  Synthesized
AQLRQGNKDAQ

SEQ ID NO: 1847 - protein, 11 aa, Artificial Sequence
  Synthesized
AQLRQKQDAAQ

SEQ ID NO: 1848 - protein, 11 aa, Artificial Sequence
  Synthesized
AQLRSATSLAQ

SEQ ID NO: 1849 - protein, 11 aa, Artificial Sequence
  Synthesized
AQLRSDRMTAQ

SEQ ID NO: 1850 - protein, 11 aa, Artificial Sequence
  Synthesized
AQLRSGNLAAQ

SEQ ID NO: 1851 - protein, 11 aa, Artificial Sequence
  Synthesized
AQLRSHDTTAQ

SEQ ID NO: 1852 - protein, 11 aa, Artificial Sequence
  Synthesized
AQLRTNDHKAQ

SEQ ID NO: 1853 - protein, 11 aa, Artificial Sequence
  Synthesized
AQLRTNTGSAQ

SEQ ID NO: 1854 - protein, 11 aa, Artificial Sequence
  Synthesized
AQLRTPPNPAQ

SEQ ID NO: 1855 - protein, 11 aa, Artificial Sequence
  Synthesized
AQLRTTSGSAQ

SEQ ID NO: 1856 - protein, 11 aa, Artificial Sequence
  Synthesized
AQLRVSEKGAQ

SEQ ID NO: 1857 - protein, 11 aa, Artificial Sequence
  Synthesized
AQLRVSNAPAQ

SEQ ID NO: 1858 - protein, 11 aa, Artificial Sequence
  Synthesized
AQLRYPSFMAQ

SEQ ID NO: 1859 - protein, 11 aa, Artificial Sequence
  Synthesized
AQLSAGVQAAQ

SEQ ID NO: 1860 - protein, 11 aa, Artificial Sequence
  Synthesized
AQLSAKAMHAQ

SEQ ID NO: 1861 - protein, 11 aa, Artificial Sequence
  Synthesized
AQLSANAKTAQ

SEQ ID NO: 1862 - protein, 11 aa, Artificial Sequence
  Synthesized
AQLSASNSSAQ

SEQ ID NO: 1863 - protein, 11 aa, Artificial Sequence
  Synthesized
AQLSASSTRAQ

SEQ ID NO: 1864 - protein, 11 aa, Artificial Sequence
  Synthesized
AQLSEPTQNAQ

SEQ ID NO: 1865 - protein, 11 aa, Artificial Sequence
  Synthesized
AQLSGSLTRAQ

SEQ ID NO: 1866 - protein, 11 aa, Artificial Sequence
  Synthesized
AQLSGSRDKAQ

SEQ ID NO: 1867 - protein, 11 aa, Artificial Sequence
  Synthesized
AQLSGSSRGAQ

SEQ ID NO: 1868 - protein, 11 aa, Artificial Sequence
  Synthesized
AQLSHSSLVAQ

SEQ ID NO: 1869 - protein, 11 aa, Artificial Sequence
  Synthesized
AQLSHYSAEAQ

SEQ ID NO: 1870 - protein, 11 aa, Artificial Sequence
  Synthesized
AQLSKFVIPAQ

SEQ ID NO: 1871 - protein, 11 aa, Artificial Sequence
  Synthesized
AQLSKILPSAQ

SEQ ID NO: 1872 - protein, 11 aa, Artificial Sequence
  Synthesized
AQLSKVGQIAQ

SEQ ID NO: 1873 - protein, 11 aa, Artificial Sequence
  Synthesized
AQLSLDRTTAQ

SEQ ID NO: 1874 - protein, 11 aa, Artificial Sequence
  Synthesized
AQLSLKNSSAQ

SEQ ID NO: 1875 - protein, 11 aa, Artificial Sequence
  Synthesized
AQLSLKSMQAQ

SEQ ID NO: 1876 - protein, 11 aa, Artificial Sequence
  Synthesized
AQLSLSQAPAQ

SEQ ID NO: 1877 - protein, 11 aa, Artificial Sequence
  Synthesized
AQLSNHGVIAQ

SEQ ID NO: 1878 - protein, 11 aa, Artificial Sequence
  Synthesized
AQLSNISLKAQ

SEQ ID NO: 1879 - protein, 11 aa, Artificial Sequence
  Synthesized
AQLSNLLRSAQ

SEQ ID NO: 1880 - protein, 11 aa, Artificial Sequence
  Synthesized
AQLSNQKVIAQ

SEQ ID NO: 1881 - protein, 11 aa, Artificial Sequence
  Synthesized
AQLSNQLKSAQ

SEQ ID NO: 1882 - protein, 11 aa, Artificial Sequence
  Synthesized
AQLSNTAMNAQ

SEQ ID NO: 1883 - protein, 11 aa, Artificial Sequence
  Synthesized
AQLSNVNQKAQ

SEQ ID NO: 1884 - protein, 11 aa, Artificial Sequence
  Synthesized
AQLSNVSPKAQ

SEQ ID NO: 1885 - protein, 11 aa, Artificial Sequence
  Synthesized
AQLSPHYARAQ

SEQ ID NO: 1886 - protein, 11 aa, Artificial Sequence
  Synthesized
AQLSPRNPLAQ

SEQ ID NO: 1887 - protein, 11 aa, Artificial Sequence
  Synthesized
AQLSPTQVRAQ

SEQ ID NO: 1888 - protein, 11 aa, Artificial Sequence
  Synthesized
AQLSQAGKMAQ

SEQ ID NO: 1889 - protein, 11 aa, Artificial Sequence
  Synthesized
AQLSQRKEVAQ

SEQ ID NO: 1890 - protein, 11 aa, Artificial Sequence
  Synthesized
AQLSQRLSAAQ

SEQ ID NO: 1891 - protein, 11 aa, Artificial Sequence
  Synthesized
AQLSQTDSTAQ

SEQ ID NO: 1892 - protein, 11 aa, Artificial Sequence
  Synthesized
AQLSRNTQPAQ

SEQ ID NO: 1893 - protein, 11 aa, Artificial Sequence
  Synthesized
AQLSRPNPPAQ

SEQ ID NO: 1894 - protein, 11 aa, Artificial Sequence
  Synthesized
AQLSRSDSLAQ

SEQ ID NO: 1895 - protein, 11 aa, Artificial Sequence
  Synthesized
AQLSRSPSTAQ

SEQ ID NO: 1896 - protein, 11 aa, Artificial Sequence
  Synthesized
AQLSRTSAAAQ

SEQ ID NO: 1897 - protein, 11 aa, Artificial Sequence
  Synthesized
AQLSRTVTGAQ

SEQ ID NO: 1898 - protein, 11 aa, Artificial Sequence
  Synthesized
AQLSRVSISAQ

SEQ ID NO: 1899 - protein, 11 aa, Artificial Sequence
  Synthesized
AQLSSARYAAQ

SEQ ID NO: 1900 - protein, 11 aa, Artificial Sequence
  Synthesized
AQLSSERLRAQ

SEQ ID NO: 1901 - protein, 11 aa, Artificial Sequence
  Synthesized
AQLSSIANQAQ

SEQ ID NO: 1902 - protein, 11 aa, Artificial Sequence
  Synthesized
AQLSSLDQTAQ

SEQ ID NO: 1903 - protein, 11 aa, Artificial Sequence
  Synthesized
AQLSSNARTAQ

SEQ ID NO: 1904 - protein, 11 aa, Artificial Sequence
  Synthesized
AQLSSRTVGAQ

SEQ ID NO: 1905 - protein, 11 aa, Artificial Sequence
  Synthesized
AQLSSSLKSAQ

SEQ ID NO: 1906 - protein, 11 aa, Artificial Sequence
  Synthesized
AQLSSSPRTAQ

SEQ ID NO: 1907 - protein, 11 aa, Artificial Sequence
  Synthesized
AQLSSSRYPAQ

SEQ ID NO: 1908 - protein, 11 aa, Artificial Sequence
  Synthesized
AQLSSTSSIAQ

SEQ ID NO: 1909 - protein, 11 aa, Artificial Sequence
  Synthesized
AQLSSVASLAQ

SEQ ID NO: 1910 - protein, 11 aa, Artificial Sequence
  Synthesized
AQLSTAGKNAQ

SEQ ID NO: 1911 - protein, 11 aa, Artificial Sequence
  Synthesized
AQLSTHTSNAQ

SEQ ID NO: 1912 - protein, 11 aa, Artificial Sequence
  Synthesized
AQLSTKSNSAQ

SEQ ID NO: 1913 - protein, 11 aa, Artificial Sequence
  Synthesized
AQLSTNVHPAQ

SEQ ID NO: 1914 - protein, 11 aa, Artificial Sequence
  Synthesized
AQLSTTALSAQ

SEQ ID NO: 1915 - protein, 11 aa, Artificial Sequence
  Synthesized
AQLSTVSRSAQ

SEQ ID NO: 1916 - protein, 11 aa, Artificial Sequence
  Synthesized
AQLTAAKDRAQ

SEQ ID NO: 1917 - protein, 11 aa, Artificial Sequence
  Synthesized
AQLTGQRTSAQ

SEQ ID NO: 1918 - protein, 11 aa, Artificial Sequence
  Synthesized
AQLTGRTSSAQ

SEQ ID NO: 1919 - protein, 11 aa, Artificial Sequence
  Synthesized
AQLTGSHLRAQ

SEQ ID NO: 1920 - protein, 11 aa, Artificial Sequence
  Synthesized
AQLTGTLAGAQ

SEQ ID NO: 1921 - protein, 11 aa, Artificial Sequence
  Synthesized
AQLTIRSQVAQ

SEQ ID NO: 1922 - protein, 11 aa, Artificial Sequence
  Synthesized
AQLTISPVSAQ

SEQ ID NO: 1923 - protein, 11 aa, Artificial Sequence
  Synthesized
AQLTKNMNNAQ

SEQ ID NO: 1924 - protein, 11 aa, Artificial Sequence
  Synthesized
AQLTKTVSNAQ

SEQ ID NO: 1925 - protein, 11 aa, Artificial Sequence
  Synthesized
AQLTNAGGMAQ

SEQ ID NO: 1926 - protein, 11 aa, Artificial Sequence
  Synthesized
AQLTNTSRAAQ

SEQ ID NO: 1927 - protein, 11 aa, Artificial Sequence
  Synthesized
AQLTPHITEAQ

SEQ ID NO: 1928 - protein, 11 aa, Artificial Sequence
  Synthesized
AQLTQADPTAQ

SEQ ID NO: 1929 - protein, 11 aa, Artificial Sequence
  Synthesized
AQLTRDQLPAQ

SEQ ID NO: 1930 - protein, 11 aa, Artificial Sequence
  Synthesized
AQLTRGPSAAQ

SEQ ID NO: 1931 - protein, 11 aa, Artificial Sequence
  Synthesized
AQLTRVSIHAQ

SEQ ID NO: 1932 - protein, 11 aa, Artificial Sequence
  Synthesized
AQLTSGVSKAQ

SEQ ID NO: 1933 - protein, 11 aa, Artificial Sequence
  Synthesized
AQLTSMKDKAQ

SEQ ID NO: 1934 - protein, 11 aa, Artificial Sequence
  Synthesized
AQLTSMNSTAQ

SEQ ID NO: 1935 - protein, 11 aa, Artificial Sequence
  Synthesized
AQLTSRAPQAQ

SEQ ID NO: 1936 - protein, 11 aa, Artificial Sequence
  Synthesized
AQLTSRTTHAQ

SEQ ID NO: 1937 - protein, 11 aa, Artificial Sequence
  Synthesized
AQLTSSVKTAQ

SEQ ID NO: 1938 - protein, 11 aa, Artificial Sequence
  Synthesized
AQLTSVALRAQ

SEQ ID NO: 1939 - protein, 11 aa, Artificial Sequence
  Synthesized
AQLTTGLSMAQ

SEQ ID NO: 1940 - protein, 11 aa, Artificial Sequence
  Synthesized
AQLTTSSTLAQ

SEQ ID NO: 1941 - protein, 11 aa, Artificial Sequence
  Synthesized
AQLTTTLGIAQ

SEQ ID NO: 1942 - protein, 11 aa, Artificial Sequence
  Synthesized
AQLTVGQPRAQ

SEQ ID NO: 1943 - protein, 11 aa, Artificial Sequence
  Synthesized
AQLTVHNITAQ

SEQ ID NO: 1944 - protein, 11 aa, Artificial Sequence
  Synthesized
AQLTVNPRSAQ

SEQ ID NO: 1945 - protein, 11 aa, Artificial Sequence
  Synthesized
AQLVADSKWAQ

SEQ ID NO: 1946 - protein, 11 aa, Artificial Sequence
  Synthesized
AQLVEGRPKAQ

SEQ ID NO: 1947 - protein, 11 aa, Artificial Sequence
  Synthesized
AQLVGAREVAQ

SEQ ID NO: 1948 - protein, 11 aa, Artificial Sequence
  Synthesized
AQLVGKTVSAQ

SEQ ID NO: 1949 - protein, 11 aa, Artificial Sequence
  Synthesized
AQLVGQSMKAQ

SEQ ID NO: 1950 - protein, 11 aa, Artificial Sequence
  Synthesized
AQLVKPTNAAQ

SEQ ID NO: 1951 - protein, 11 aa, Artificial Sequence
  Synthesized
AQLVKSTGAAQ

SEQ ID NO: 1952 - protein, 11 aa, Artificial Sequence
  Synthesized
AQLVLPRGNAQ

SEQ ID NO: 1953 - protein, 11 aa, Artificial Sequence
  Synthesized
AQLVLPRPKAQ

SEQ ID NO: 1954 - protein, 11 aa, Artificial Sequence
  Synthesized
AQLVNHAKSAQ

SEQ ID NO: 1955 - protein, 11 aa, Artificial Sequence
  Synthesized
AQLVNHHTVAQ

SEQ ID NO: 1956 - protein, 11 aa, Artificial Sequence
  Synthesized
AQLVPGGITAQ

SEQ ID NO: 1957 - protein, 11 aa, Artificial Sequence
  Synthesized
AQLVPTITSAQ

SEQ ID NO: 1958 - protein, 11 aa, Artificial Sequence
  Synthesized
AQLVRQQNTAQ

SEQ ID NO: 1959 - protein, 11 aa, Artificial Sequence
  Synthesized
AQLVRTTTGAQ

SEQ ID NO: 1960 - protein, 11 aa, Artificial Sequence
  Synthesized
AQLVSDPQKAQ

SEQ ID NO: 1961 - protein, 11 aa, Artificial Sequence
  Synthesized
AQLVSKMDTAQ

SEQ ID NO: 1962 - protein, 11 aa, Artificial Sequence
  Synthesized
AQLVSYSTNAQ

SEQ ID NO: 1963 - protein, 11 aa, Artificial Sequence
  Synthesized
AQLVTAGTAAQ

SEQ ID NO: 1964 - protein, 11 aa, Artificial Sequence
  Synthesized
AQLYDRSSMAQ

SEQ ID NO: 1965 - protein, 11 aa, Artificial Sequence
  Synthesized
AQLYGKSNTAQ

SEQ ID NO: 1966 - protein, 11 aa, Artificial Sequence
  Synthesized
AQLYGLDAKAQ

SEQ ID NO: 1967 - protein, 11 aa, Artificial Sequence
  Synthesized
AQLYKQQYDAQ

SEQ ID NO: 1968 - protein, 11 aa, Artificial Sequence
  Synthesized
AQLYLPRAKAQ

SEQ ID NO: 1969 - protein, 11 aa, Artificial Sequence
  Synthesized
AQLYMNSFMAQ

SEQ ID NO: 1970 - protein, 11 aa, Artificial Sequence
  Synthesized
AQLYPQLQSAQ

SEQ ID NO: 1971 - protein, 11 aa, Artificial Sequence
  Synthesized
AQLYPSSLAAQ

SEQ ID NO: 1972 - protein, 11 aa, Artificial Sequence
  Synthesized
AQLYSSTNRAQ

SEQ ID NO: 1973 - protein, 11 aa, Artificial Sequence
  Synthesized
AQLYTTKISAQ

SEQ ID NO: 1974 - protein, 11 aa, Artificial Sequence
  Synthesized
AQMAADSFMAQ

SEQ ID NO: 1975 - protein, 11 aa, Artificial Sequence
  Synthesized
AQMAASATRAQ

SEQ ID NO: 1976 - protein, 11 aa, Artificial Sequence
  Synthesized
AQMALPGPHAQ

SEQ ID NO: 1977 - protein, 11 aa, Artificial Sequence
  Synthesized
AQMALTNQRAQ

SEQ ID NO: 1978 - protein, 11 aa, Artificial Sequence
  Synthesized
AQMANKHNSAQ

SEQ ID NO: 1979 - protein, 11 aa, Artificial Sequence
  Synthesized
AQMAPRESVAQ

SEQ ID NO: 1980 - protein, 11 aa, Artificial Sequence
  Synthesized
AQMARHLDPAQ

SEQ ID NO: 1981 - protein, 11 aa, Artificial Sequence
  Synthesized
AQMASNSLKAQ

SEQ ID NO: 1982 - protein, 11 aa, Artificial Sequence
  Synthesized
AQMATKYASAQ

SEQ ID NO: 1983 - protein, 11 aa, Artificial Sequence
  Synthesized
AQMAVKHTQAQ

SEQ ID NO: 1984 - protein, 11 aa, Artificial Sequence
  Synthesized
AQMDDKKKWAQ

SEQ ID NO: 1985 - protein, 11 aa, Artificial Sequence
  Synthesized
AQMDRVNHAAQ

SEQ ID NO: 1986 - protein, 11 aa, Artificial Sequence
  Synthesized
AQMDSKGRPAQ

SEQ ID NO: 1987 - protein, 11 aa, Artificial Sequence
  Synthesized
AQMDSKMRAAQ

SEQ ID NO: 1988 - protein, 11 aa, Artificial Sequence
  Synthesized
AQMDVGNRKAQ

SEQ ID NO: 1989 - protein, 11 aa, Artificial Sequence
  Synthesized
AQMEKRMYSAQ

SEQ ID NO: 1990 - protein, 11 aa, Artificial Sequence
  Synthesized
AQMFLPGGTAQ

SEQ ID NO: 1991 - protein, 11 aa, Artificial Sequence
  Synthesized
AQMFLPRFFAQ

SEQ ID NO: 1992 - protein, 11 aa, Artificial Sequence
  Synthesized
AQMFPGSSPAQ

SEQ ID NO: 1993 - protein, 11 aa, Artificial Sequence
  Synthesized
AQMGININTAQ

SEQ ID NO: 1994 - protein, 11 aa, Artificial Sequence
  Synthesized
AQMGLPKEHAQ

SEQ ID NO: 1995 - protein, 11 aa, Artificial Sequence
  Synthesized
AQMGLPNGIAQ

SEQ ID NO: 1996 - protein, 11 aa, Artificial Sequence
  Synthesized
AQMGNQKVIAQ

SEQ ID NO: 1997 - protein, 11 aa, Artificial Sequence
  Synthesized
AQMGPPSAMAQ

SEQ ID NO: 1998 - protein, 11 aa, Artificial Sequence
  Synthesized
AQMGVSGGVAQ

SEQ ID NO: 1999 - protein, 11 aa, Artificial Sequence
  Synthesized
AQMHGPSFMAQ

SEQ ID NO: 2000 - protein, 11 aa, Artificial Sequence
  Synthesized
AQMHKHSFMAQ

SEQ ID NO: 2001 - protein, 11 aa, Artificial Sequence
  Synthesized
AQMHLFSFMAQ

SEQ ID NO: 2002 - protein, 11 aa, Artificial Sequence
  Synthesized
AQMHLPANPAQ

SEQ ID NO: 2003 - protein, 11 aa, Artificial Sequence
  Synthesized
AQMHLPRLMAQ

SEQ ID NO: 2004 - protein, 11 aa, Artificial Sequence
  Synthesized
AQMHNHSAMAQ

SEQ ID NO: 2005 - protein, 11 aa, Artificial Sequence
  Synthesized
AQMIKSNTPAQ

SEQ ID NO: 2006 - protein, 11 aa, Artificial Sequence
  Synthesized
AQMILPRMPAQ

SEQ ID NO: 2007 - protein, 11 aa, Artificial Sequence
  Synthesized
AQMISAKSDAQ

SEQ ID NO: 2008 - protein, 11 aa, Artificial Sequence
  Synthesized
AQMISANSDAQ

SEQ ID NO: 2009 - protein, 11 aa, Artificial Sequence
  Synthesized
AQMISANSYAQ

SEQ ID NO: 2010 - protein, 11 aa, Artificial Sequence
  Synthesized
AQMISANTDAQ

SEQ ID NO: 2011 - protein, 11 aa, Artificial Sequence
  Synthesized
AQMKANTGLAQ

SEQ ID NO: 2012 - protein, 11 aa, Artificial Sequence
  Synthesized
AQMKLPHFYAQ

SEQ ID NO: 2013 - protein, 11 aa, Artificial Sequence
  Synthesized
AQMKNDSEVAQ

SEQ ID NO: 2014 - protein, 11 aa, Artificial Sequence
  Synthesized
AQMKNGHIVAQ

SEQ ID NO: 2015 - protein, 11 aa, Artificial Sequence
  Synthesized
AQMKSEPRTAQ

SEQ ID NO: 2016 - protein, 11 aa, Artificial Sequence
  Synthesized
AQMKTATDIAQ

SEQ ID NO: 2017 - protein, 11 aa, Artificial Sequence
  Synthesized
AQMKYHSFMAQ

SEQ ID NO: 2018 - protein, 11 aa, Artificial Sequence
  Synthesized
AQMLAKMSVAQ

SEQ ID NO: 2019 - protein, 11 aa, Artificial Sequence
  Synthesized
AQMLDRARSAQ

SEQ ID NO: 2020 - protein, 11 aa, Artificial Sequence
  Synthesized
AQMLDRSLSAQ

SEQ ID NO: 2021 - protein, 11 aa, Artificial Sequence
  Synthesized
AQMLGLHDQAQ

SEQ ID NO: 2022 - protein, 11 aa, Artificial Sequence
  Synthesized
AQMLKGQVGAQ

SEQ ID NO: 2023 - protein, 11 aa, Artificial Sequence
  Synthesized
AQMLKPSHQAQ

SEQ ID NO: 2024 - protein, 11 aa, Artificial Sequence
  Synthesized
AQMLNASIPAQ

SEQ ID NO: 2025 - protein, 11 aa, Artificial Sequence
  Synthesized
AQMLPDAARAQ

SEQ ID NO: 2026 - protein, 11 aa, Artificial Sequence
  Synthesized
AQMLQSGRPAQ

SEQ ID NO: 2027 - protein, 11 aa, Artificial Sequence
  Synthesized
AQMLRTDSNAQ

SEQ ID NO: 2028 - protein, 11 aa, Artificial Sequence
  Synthesized
AQMLSAAERAQ

SEQ ID NO: 2029 - protein, 11 aa, Artificial Sequence
  Synthesized
AQMLSERGTAQ

SEQ ID NO: 2030 - protein, 11 aa, Artificial Sequence
  Synthesized
AQMLSKAASAQ

SEQ ID NO: 2031 - protein, 11 aa, Artificial Sequence
  Synthesized
AQMLSLSDKAQ

SEQ ID NO: 2032 - protein, 11 aa, Artificial Sequence
  Synthesized
AQMLTGITNAQ

SEQ ID NO: 2033 - protein, 11 aa, Artificial Sequence
  Synthesized
AQMLTGITTAQ

SEQ ID NO: 2034 - protein, 11 aa, Artificial Sequence
  Synthesized
AQMLTGNTTAQ

SEQ ID NO: 2035 - protein, 11 aa, Artificial Sequence
  Synthesized
AQMMAVGALAQ

SEQ ID NO: 2036 - protein, 11 aa, Artificial Sequence
  Synthesized
AQMMEDSFMAQ

SEQ ID NO: 2037 - protein, 11 aa, Artificial Sequence
  Synthesized
AQMMETMGVAQ

SEQ ID NO: 2038 - protein, 11 aa, Artificial Sequence
  Synthesized
AQMMIQVREAQ

SEQ ID NO: 2039 - protein, 11 aa, Artificial Sequence
  Synthesized
AQMMSKSAMAQ

SEQ ID NO: 2040 - protein, 11 aa, Artificial Sequence
  Synthesized
AQMMTNTKSAQ

SEQ ID NO: 2041 - protein, 11 aa, Artificial Sequence
  Synthesized
AQMNGIRYAAQ

SEQ ID NO: 2042 - protein, 11 aa, Artificial Sequence
  Synthesized
AQMNGTRRHAQ

SEQ ID NO: 2043 - protein, 11 aa, Artificial Sequence
  Synthesized
AQMNKTRYTAQ

SEQ ID NO: 2044 - protein, 11 aa, Artificial Sequence
  Synthesized
AQMNLTRRYAQ

SEQ ID NO: 2045 - protein, 11 aa, Artificial Sequence
  Synthesized
AQMNNAFHMAQ

SEQ ID NO: 2046 - protein, 11 aa, Artificial Sequence
  Synthesized
AQMNNAGHGAQ

SEQ ID NO: 2047 - protein, 11 aa, Artificial Sequence
  Synthesized
AQMNNAHRPAQ

SEQ ID NO: 2048 - protein, 11 aa, Artificial Sequence
  Synthesized
AQMNNALGYAQ

SEQ ID NO: 2049 - protein, 11 aa, Artificial Sequence
  Synthesized
AQMNNAMHHAQ

SEQ ID NO: 2050 - protein, 11 aa, Artificial Sequence
  Synthesized
AQMNNAMITAQ

SEQ ID NO: 2051 - protein, 11 aa, Artificial Sequence
  Synthesized
AQMNNAPDYAQ

SEQ ID NO: 2052 - protein, 11 aa, Artificial Sequence
  Synthesized
AQMNNAPPMAQ

SEQ ID NO: 2053 - protein, 11 aa, Artificial Sequence
  Synthesized
AQMNNARPHAQ

SEQ ID NO: 2054 - protein, 11 aa, Artificial Sequence
  Synthesized
AQMNNAYFQAQ

SEQ ID NO: 2055 - protein, 11 aa, Artificial Sequence
  Synthesized
AQMNNDFMGAQ

SEQ ID NO: 2056 - protein, 11 aa, Artificial Sequence
  Synthesized
AQMNNDNYDAQ

SEQ ID NO: 2057 - protein, 11 aa, Artificial Sequence
  Synthesized
AQMNNDSGMAQ

SEQ ID NO: 2058 - protein, 11 aa, Artificial Sequence
  Synthesized
AQMNNDYTYAQ

SEQ ID NO: 2059 - protein, 11 aa, Artificial Sequence
  Synthesized
AQMNNEEIFAQ

SEQ ID NO: 2060 - protein, 11 aa, Artificial Sequence
  Synthesized
AQMNNEFFVAQ

SEQ ID NO: 2061 - protein, 11 aa, Artificial Sequence
  Synthesized
AQMNNEMPQAQ

SEQ ID NO: 2062 - protein, 11 aa, Artificial Sequence
  Synthesized
AQMNNERDNAQ

SEQ ID NO: 2063 - protein, 11 aa, Artificial Sequence
  Synthesized
AQMNNFHHRAQ

SEQ ID NO: 2064 - protein, 11 aa, Artificial Sequence
  Synthesized
AQMNNFHPHAQ

SEQ ID NO: 2065 - protein, 11 aa, Artificial Sequence
  Synthesized
AQMNNFHPIAQ

SEQ ID NO: 2066 - protein, 11 aa, Artificial Sequence
  Synthesized
AQMNNFHRPAQ

SEQ ID NO: 2067 - protein, 11 aa, Artificial Sequence
  Synthesized
AQMNNFKPPAQ

SEQ ID NO: 2068 - protein, 11 aa, Artificial Sequence
  Synthesized
AQMNNFLNVAQ

SEQ ID NO: 2069 - protein, 11 aa, Artificial Sequence
  Synthesized
AQMNNFLPPAQ

SEQ ID NO: 2070 - protein, 11 aa, Artificial Sequence
  Synthesized
AQMNNFPHGAQ

SEQ ID NO: 2071 - protein, 11 aa, Artificial Sequence
  Synthesized
AQMNNFPPQAQ

SEQ ID NO: 2072 - protein, 11 aa, Artificial Sequence
  Synthesized
AQMNNFPQYAQ

SEQ ID NO: 2073 - protein, 11 aa, Artificial Sequence
  Synthesized
AQMNNFQHIAQ

SEQ ID NO: 2074 - protein, 11 aa, Artificial Sequence
  Synthesized
AQMNNFRMTAQ

SEQ ID NO: 2075 - protein, 11 aa, Artificial Sequence
  Synthesized
AQMNNFTRPAQ

SEQ ID NO: 2076 - protein, 11 aa, Artificial Sequence
  Synthesized
AQMNNGFERAQ

SEQ ID NO: 2077 - protein, 11 aa, Artificial Sequence
  Synthesized
AQMNNGFHYAQ

SEQ ID NO: 2078 - protein, 11 aa, Artificial Sequence
  Synthesized
AQMNNGFKRAQ

SEQ ID NO: 2079 - protein, 11 aa, Artificial Sequence
  Synthesized
AQMNNGFMNAQ

SEQ ID NO: 2080 - protein, 11 aa, Artificial Sequence
  Synthesized
AQMNNGFPYAQ

SEQ ID NO: 2081 - protein, 11 aa, Artificial Sequence
  Synthesized
AQMNNGFYPAQ

SEQ ID NO: 2082 - protein, 11 aa, Artificial Sequence
  Synthesized
AQMNNGGLDAQ

SEQ ID NO: 2083 - protein, 11 aa, Artificial Sequence
  Synthesized
AQMNNGGQYAQ

SEQ ID NO: 2084 - protein, 11 aa, Artificial Sequence
  Synthesized
AQMNNGGSFAQ

SEQ ID NO: 2085 - protein, 11 aa, Artificial Sequence
  Synthesized
AQMNNGMLHAQ

SEQ ID NO: 2086 - protein, 11 aa, Artificial Sequence
  Synthesized
AQMNNGNPTAQ

SEQ ID NO: 2087 - protein, 11 aa, Artificial Sequence
  Synthesized
AQMNNGPNRAQ

SEQ ID NO: 2088 - protein, 11 aa, Artificial Sequence
  Synthesized
AQMNNGPYPAQ

SEQ ID NO: 2089 - protein, 11 aa, Artificial Sequence
  Synthesized
AQMNNGRRAAQ

SEQ ID NO: 2090 - protein, 11 aa, Artificial Sequence
  Synthesized
AQMNNGSMHAQ

SEQ ID NO: 2091 - protein, 11 aa, Artificial Sequence
  Synthesized
AQMNNGYEDAQ

SEQ ID NO: 2092 - protein, 11 aa, Artificial Sequence
  Synthesized
AQMNNGYFLAQ

SEQ ID NO: 2093 - protein, 11 aa, Artificial Sequence
  Synthesized
AQMNNGYGRAQ

SEQ ID NO: 2094 - protein, 11 aa, Artificial Sequence
  Synthesized
AQMNNHFDQAQ

SEQ ID NO: 2095 - protein, 11 aa, Artificial Sequence
  Synthesized
AQMNNHFKLAQ

SEQ ID NO: 2096 - protein, 11 aa, Artificial Sequence
  Synthesized
AQMNNHFYIAQ

SEQ ID NO: 2097 - protein, 11 aa, Artificial Sequence
  Synthesized
AQMNNHGGKAQ

SEQ ID NO: 2098 - protein, 11 aa, Artificial Sequence
  Synthesized
AQMNNHGGLAQ

SEQ ID NO: 2099 - protein, 11 aa, Artificial Sequence
  Synthesized
AQMNNHGSTAQ

SEQ ID NO: 2100 - protein, 11 aa, Artificial Sequence
  Synthesized
AQMNNHHHMAQ

SEQ ID NO: 2101 - protein, 11 aa, Artificial Sequence
  Synthesized
AQMNNHHHPAQ

SEQ ID NO: 2102 - protein, 11 aa, Artificial Sequence
  Synthesized
AQMNNHHIYAQ

SEQ ID NO: 2103 - protein, 11 aa, Artificial Sequence
  Synthesized
AQMNNHHYIAQ

SEQ ID NO: 2104 - protein, 11 aa, Artificial Sequence
  Synthesized
AQMNNHKYGAQ

SEQ ID NO: 2105 - protein, 11 aa, Artificial Sequence
  Synthesized
AQMNNHNFFAQ

SEQ ID NO: 2106 - protein, 11 aa, Artificial Sequence
  Synthesized
AQMNNHNIKAQ

SEQ ID NO: 2107 - protein, 11 aa, Artificial Sequence
  Synthesized
AQMNNHPAQAQ

SEQ ID NO: 2108 - protein, 11 aa, Artificial Sequence
  Synthesized
AQMNNHPFMAQ

SEQ ID NO: 2109 - protein, 11 aa, Artificial Sequence
  Synthesized
AQMNNHPGPAQ

SEQ ID NO: 2110 - protein, 11 aa, Artificial Sequence
  Synthesized
AQMNNHPPGAQ

SEQ ID NO: 2111 - protein, 11 aa, Artificial Sequence
  Synthesized
AQMNNHRDQAQ

SEQ ID NO: 2112 - protein, 11 aa, Artificial Sequence
  Synthesized
AQMNNHRIQAQ

SEQ ID NO: 2113 - protein, 11 aa, Artificial Sequence
  Synthesized
AQMNNHRYFAQ

SEQ ID NO: 2114 - protein, 11 aa, Artificial Sequence
  Synthesized
AQMNNHSNHAQ

SEQ ID NO: 2115 - protein, 11 aa, Artificial Sequence
  Synthesized
AQMNNIHGRAQ

SEQ ID NO: 2116 - protein, 11 aa, Artificial Sequence
  Synthesized
AQMNNIIGNAQ

SEQ ID NO: 2117 - protein, 11 aa, Artificial Sequence
  Synthesized
AQMNNINLAAQ

SEQ ID NO: 2118 - protein, 11 aa, Artificial Sequence
  Synthesized
AQMNNIRDVAQ

SEQ ID NO: 2119 - protein, 11 aa, Artificial Sequence
  Synthesized
AQMNNIYAYAQ

SEQ ID NO: 2120 - protein, 11 aa, Artificial Sequence
  Synthesized
AQMNNIYSGAQ

SEQ ID NO: 2121 - protein, 11 aa, Artificial Sequence
  Synthesized
AQMNNKFFGAQ

SEQ ID NO: 2122 - protein, 11 aa, Artificial Sequence
  Synthesized
AQMNNKFISAQ

SEQ ID NO: 2123 - protein, 11 aa, Artificial Sequence
  Synthesized
AQMNNKGFPAQ

SEQ ID NO: 2124 - protein, 11 aa, Artificial Sequence
  Synthesized
AQMNNKGGSAQ

SEQ ID NO: 2125 - protein, 11 aa, Artificial Sequence
  Synthesized
AQMNNKGPKAQ

SEQ ID NO: 2126 - protein, 11 aa, Artificial Sequence
  Synthesized
AQMNNKHFFAQ

SEQ ID NO: 2127 - protein, 11 aa, Artificial Sequence
  Synthesized
AQMNNKMGFAQ

SEQ ID NO: 2128 - protein, 11 aa, Artificial Sequence
  Synthesized
AQMNNKPHFAQ

SEQ ID NO: 2129 - protein, 11 aa, Artificial Sequence
  Synthesized
AQMNNKPIGAQ

SEQ ID NO: 2130 - protein, 11 aa, Artificial Sequence
  Synthesized
AQMNNKPKHAQ

SEQ ID NO: 2131 - protein, 11 aa, Artificial Sequence
  Synthesized
AQMNNKPMYAQ

SEQ ID NO: 2132 - protein, 11 aa, Artificial Sequence
  Synthesized
AQMNNKVGYAQ

SEQ ID NO: 2133 - protein, 11 aa, Artificial Sequence
  Synthesized
AQMNNLHYHAQ

SEQ ID NO: 2134 - protein, 11 aa, Artificial Sequence
  Synthesized
AQMNNLKKPAQ

SEQ ID NO: 2135 - protein, 11 aa, Artificial Sequence
  Synthesized
AQMNNLLKRAQ

SEQ ID NO: 2136 - protein, 11 aa, Artificial Sequence
  Synthesized
AQMNNLPDYAQ

SEQ ID NO: 2137 - protein, 11 aa, Artificial Sequence
  Synthesized
AQMNNLRYYAQ

SEQ ID NO: 2138 - protein, 11 aa, Artificial Sequence
  Synthesized
AQMNNLSYVAQ

SEQ ID NO: 2139 - protein, 11 aa, Artificial Sequence
  Synthesized
AQMNNMAETAQ

SEQ ID NO: 2140 - protein, 11 aa, Artificial Sequence
  Synthesized
AQMNNMFGHAQ

SEQ ID NO: 2141 - protein, 11 aa, Artificial Sequence
  Synthesized
AQMNNMKPYAQ

SEQ ID NO: 2142 - protein, 11 aa, Artificial Sequence
  Synthesized
AQMNNMNPFAQ

SEQ ID NO: 2143 - protein, 11 aa, Artificial Sequence
  Synthesized
AQMNNMQMAAQ

SEQ ID NO: 2144 - protein, 11 aa, Artificial Sequence
  Synthesized
AQMNNNFNRAQ

SEQ ID NO: 2145 - protein, 11 aa, Artificial Sequence
  Synthesized
AQMNNNHPFAQ

SEQ ID NO: 2146 - protein, 11 aa, Artificial Sequence
  Synthesized
AQMNNNQPRAQ

SEQ ID NO: 2147 - protein, 11 aa, Artificial Sequence
  Synthesized
AQMNNNSRFAQ

SEQ ID NO: 2148 - protein, 11 aa, Artificial Sequence
  Synthesized
AQMNNPAPFAQ

SEQ ID NO: 2149 - protein, 11 aa, Artificial Sequence
  Synthesized
AQMNNPAPGAQ

SEQ ID NO: 2150 - protein, 11 aa, Artificial Sequence
  Synthesized
AQMNNPDHFAQ

SEQ ID NO: 2151 - protein, 11 aa, Artificial Sequence
  Synthesized
AQMNNPFFPAQ

SEQ ID NO: 2152 - protein, 11 aa, Artificial Sequence
  Synthesized
AQMNNPFKGAQ

SEQ ID NO: 2153 - protein, 11 aa, Artificial Sequence
  Synthesized
AQMNNPFSAAQ

SEQ ID NO: 2154 - protein, 11 aa, Artificial Sequence
  Synthesized
AQMNNPFVHAQ

SEQ ID NO: 2155 - protein, 11 aa, Artificial Sequence
  Synthesized
AQMNNPGENAQ

SEQ ID NO: 2156 - protein, 11 aa, Artificial Sequence
  Synthesized
AQMNNPGMGAQ

SEQ ID NO: 2157 - protein, 11 aa, Artificial Sequence
  Synthesized
AQMNNPHIGAQ

SEQ ID NO: 2158 - protein, 11 aa, Artificial Sequence
  Synthesized
AQMNNPHMPAQ

SEQ ID NO: 2159 - protein, 11 aa, Artificial Sequence
  Synthesized
AQMNNPIHLAQ

SEQ ID NO: 2160 - protein, 11 aa, Artificial Sequence
  Synthesized
AQMNNPKHKAQ

SEQ ID NO: 2161 - protein, 11 aa, Artificial Sequence
  Synthesized
AQMNNPLIQAQ

SEQ ID NO: 2162 - protein, 11 aa, Artificial Sequence
  Synthesized
AQMNNPLRRAQ

SEQ ID NO: 2163 - protein, 11 aa, Artificial Sequence
  Synthesized
AQMNNPNEIAQ

SEQ ID NO: 2164 - protein, 11 aa, Artificial Sequence
  Synthesized
AQMNNPNMAAQ

SEQ ID NO: 2165 - protein, 11 aa, Artificial Sequence
  Synthesized
AQMNNPNNLAQ

SEQ ID NO: 2166 - protein, 11 aa, Artificial Sequence
  Synthesized
AQMNNPPHGAQ

SEQ ID NO: 2167 - protein, 11 aa, Artificial Sequence
  Synthesized
AQMNNPPSFAQ

SEQ ID NO: 2168 - protein, 11 aa, Artificial Sequence
  Synthesized
AQMNNPPYLAQ

SEQ ID NO: 2169 - protein, 11 aa, Artificial Sequence
  Synthesized
AQMNNPRHHAQ

SEQ ID NO: 2170 - protein, 11 aa, Artificial Sequence
  Synthesized
AQMNNPRMKAQ

SEQ ID NO: 2171 - protein, 11 aa, Artificial Sequence
  Synthesized
AQMNNPSRMAQ

SEQ ID NO: 2172 - protein, 11 aa, Artificial Sequence
  Synthesized
AQMNNPSYRAQ

SEQ ID NO: 2173 - protein, 11 aa, Artificial Sequence
  Synthesized
AQMNNPTGKAQ

SEQ ID NO: 2174 - protein, 11 aa, Artificial Sequence
  Synthesized
AQMNNPTGRAQ

SEQ ID NO: 2175 - protein, 11 aa, Artificial Sequence
  Synthesized
AQMNNPYGKAQ

SEQ ID NO: 2176 - protein, 11 aa, Artificial Sequence
  Synthesized
AQMNNPYRKAQ

SEQ ID NO: 2177 - protein, 11 aa, Artificial Sequence
  Synthesized
AQMNNPYYKAQ

SEQ ID NO: 2178 - protein, 11 aa, Artificial Sequence
  Synthesized
AQMNNPYYNAQ

SEQ ID NO: 2179 - protein, 11 aa, Artificial Sequence
  Synthesized
AQMNNQHYLAQ

SEQ ID NO: 2180 - protein, 11 aa, Artificial Sequence
  Synthesized
AQMNNQKTYAQ

SEQ ID NO: 2181 - protein, 11 aa, Artificial Sequence
  Synthesized
AQMNNRASVAQ

SEQ ID NO: 2182 - protein, 11 aa, Artificial Sequence
  Synthesized
AQMNNRAYLAQ

SEQ ID NO: 2183 - protein, 11 aa, Artificial Sequence
  Synthesized
AQMNNRFKPAQ

SEQ ID NO: 2184 - protein, 11 aa, Artificial Sequence
  Synthesized
AQMNNRGFIAQ

SEQ ID NO: 2185 - protein, 11 aa, Artificial Sequence
  Synthesized
AQMNNRGKPAQ

SEQ ID NO: 2186 - protein, 11 aa, Artificial Sequence
  Synthesized
AQMNNRIGGAQ

SEQ ID NO: 2187 - protein, 11 aa, Artificial Sequence
  Synthesized
AQMNNRLKYAQ

SEQ ID NO: 2188 - protein, 11 aa, Artificial Sequence
  Synthesized
AQMNNRPGHAQ

SEQ ID NO: 2189 - protein, 11 aa, Artificial Sequence
  Synthesized
AQMNNRRFIAQ

SEQ ID NO: 2190 - protein, 11 aa, Artificial Sequence
  Synthesized
AQMNNRVGYAQ

SEQ ID NO: 2191 - protein, 11 aa, Artificial Sequence
  Synthesized
AQMNNRYAEAQ

SEQ ID NO: 2192 - protein, 11 aa, Artificial Sequence
  Synthesized
AQMNNSAMEAQ

SEQ ID NO: 2193 - protein, 11 aa, Artificial Sequence
  Synthesized
AQMNNSDLQAQ

SEQ ID NO: 2194 - protein, 11 aa, Artificial Sequence
  Synthesized
AQMNNSEPEAQ

SEQ ID NO: 2195 - protein, 11 aa, Artificial Sequence
  Synthesized
AQMNNSFRRAQ

SEQ ID NO: 2196 - protein, 11 aa, Artificial Sequence
  Synthesized
AQMNNSGYYAQ

SEQ ID NO: 2197 - protein, 11 aa, Artificial Sequence
  Synthesized
AQMNNSKFFAQ

SEQ ID NO: 2198 - protein, 11 aa, Artificial Sequence
  Synthesized
AQMNNSQFNAQ

SEQ ID NO: 2199 - protein, 11 aa, Artificial Sequence
  Synthesized
AQMNNSYEQAQ

SEQ ID NO: 2200 - protein, 11 aa, Artificial Sequence
  Synthesized
AQMNNTERRAQ

SEQ ID NO: 2201 - protein, 11 aa, Artificial Sequence
  Synthesized
AQMNNTFVPAQ

SEQ ID NO: 2202 - protein, 11 aa, Artificial Sequence
  Synthesized
AQMNNTGKKAQ

SEQ ID NO: 2203 - protein, 11 aa, Artificial Sequence
  Synthesized
AQMNNTHFGAQ

SEQ ID NO: 2204 - protein, 11 aa, Artificial Sequence
  Synthesized
AQMNNTHHHAQ

SEQ ID NO: 2205 - protein, 11 aa, Artificial Sequence
  Synthesized
AQMNNTHKYAQ

SEQ ID NO: 2206 - protein, 11 aa, Artificial Sequence
  Synthesized
AQMNNTHPFAQ

SEQ ID NO: 2207 - protein, 11 aa, Artificial Sequence
  Synthesized
AQMNNTIFHAQ

SEQ ID NO: 2208 - protein, 11 aa, Artificial Sequence
  Synthesized
AQMNNTMNRAQ

SEQ ID NO: 2209 - protein, 11 aa, Artificial Sequence
  Synthesized
AQMNNTPFQAQ

SEQ ID NO: 2210 - protein, 11 aa, Artificial Sequence
  Synthesized
AQMNNTRENAQ

SEQ ID NO: 2211 - protein, 11 aa, Artificial Sequence
  Synthesized
AQMNNTRKPAQ

SEQ ID NO: 2212 - protein, 11 aa, Artificial Sequence
  Synthesized
AQMNNTVRAAQ

SEQ ID NO: 2213 - protein, 11 aa, Artificial Sequence
  Synthesized
AQMNNTYVSAQ

SEQ ID NO: 2214 - protein, 11 aa, Artificial Sequence
  Synthesized
AQMNNVDLGAQ

SEQ ID NO: 2215 - protein, 11 aa, Artificial Sequence
  Synthesized
AQMNNVRPKAQ

SEQ ID NO: 2216 - protein, 11 aa, Artificial Sequence
  Synthesized
AQMNNVTRMAQ

SEQ ID NO: 2217 - protein, 11 aa, Artificial Sequence
  Synthesized
AQMNNYAENAQ

SEQ ID NO: 2218 - protein, 11 aa, Artificial Sequence
  Synthesized
AQMNNYANSAQ

SEQ ID NO: 2219 - protein, 11 aa, Artificial Sequence
  Synthesized
AQMNNYDMTAQ

SEQ ID NO: 2220 - protein, 11 aa, Artificial Sequence
  Synthesized
AQMNNYFVVAQ

SEQ ID NO: 2221 - protein, 11 aa, Artificial Sequence
  Synthesized
AQMNNYGGNAQ

SEQ ID NO: 2222 - protein, 11 aa, Artificial Sequence
  Synthesized
AQMNNYHAVAQ

SEQ ID NO: 2223 - protein, 11 aa, Artificial Sequence
  Synthesized
AQMNNYHDHAQ

SEQ ID NO: 2224 - protein, 11 aa, Artificial Sequence
  Synthesized
AQMNNYHKNAQ

SEQ ID NO: 2225 - protein, 11 aa, Artificial Sequence
  Synthesized
AQMNNYHVPAQ

SEQ ID NO: 2226 - protein, 11 aa, Artificial Sequence
  Synthesized
AQMNNYHYLAQ

SEQ ID NO: 2227 - protein, 11 aa, Artificial Sequence
  Synthesized
AQMNNYIRGAQ

SEQ ID NO: 2228 - protein, 11 aa, Artificial Sequence
  Synthesized
AQMNNYKGPAQ

SEQ ID NO: 2229 - protein, 11 aa, Artificial Sequence
  Synthesized
AQMNNYKHHAQ

SEQ ID NO: 2230 - protein, 11 aa, Artificial Sequence
  Synthesized
AQMNNYKPSAQ

SEQ ID NO: 2231 - protein, 11 aa, Artificial Sequence
  Synthesized
AQMNNYSDGAQ

SEQ ID NO: 2232 - protein, 11 aa, Artificial Sequence
  Synthesized
AQMNNYTLKAQ

SEQ ID NO: 2233 - protein, 11 aa, Artificial Sequence
  Synthesized
AQMNNYYGSAQ

SEQ ID NO: 2234 - protein, 11 aa, Artificial Sequence
  Synthesized
AQMNPGRNSAQ

SEQ ID NO: 2235 - protein, 11 aa, Artificial Sequence
  Synthesized
AQMNPTRGPAQ

SEQ ID NO: 2236 - protein, 11 aa, Artificial Sequence
  Synthesized
AQMNPTRKAAQ

SEQ ID NO: 2237 - protein, 11 aa, Artificial Sequence
  Synthesized
AQMNPTRYIAQ

SEQ ID NO: 2238 - protein, 11 aa, Artificial Sequence
  Synthesized
AQMNPVGRSAQ

SEQ ID NO: 2239 - protein, 11 aa, Artificial Sequence
  Synthesized
AQMNPVNRSAQ

SEQ ID NO: 2240 - protein, 11 aa, Artificial Sequence
  Synthesized
AQMNPVPRSAQ

SEQ ID NO: 2241 - protein, 11 aa, Artificial Sequence
  Synthesized
AQMNPVTRSAQ

SEQ ID NO: 2242 - protein, 11 aa, Artificial Sequence
  Synthesized
AQMNRTRLMAQ

SEQ ID NO: 2243 - protein, 11 aa, Artificial Sequence
  Synthesized
AQMNTLKSDAQ

SEQ ID NO: 2244 - protein, 11 aa, Artificial Sequence
  Synthesized
AQMNVTRHTAQ

SEQ ID NO: 2245 - protein, 11 aa, Artificial Sequence
  Synthesized
AQMNYTRAIAQ

SEQ ID NO: 2246 - protein, 11 aa, Artificial Sequence
  Synthesized
AQMPAVSSKAQ

SEQ ID NO: 2247 - protein, 11 aa, Artificial Sequence
  Synthesized
AQMPLPRGPAQ

SEQ ID NO: 2248 - protein, 11 aa, Artificial Sequence
  Synthesized
AQMPLPRHPAQ

SEQ ID NO: 2249 - protein, 11 aa, Artificial Sequence
  Synthesized
AQMPLRSAMAQ

SEQ ID NO: 2250 - protein, 11 aa, Artificial Sequence
  Synthesized
AQMPNPGSRAQ

SEQ ID NO: 2251 - protein, 11 aa, Artificial Sequence
  Synthesized
AQMQHSLPPAQ

SEQ ID NO: 2252 - protein, 11 aa, Artificial Sequence
  Synthesized
AQMQMPSFMAQ

SEQ ID NO: 2253 - protein, 11 aa, Artificial Sequence
  Synthesized
AQMQNGRSVAQ

SEQ ID NO: 2254 - protein, 11 aa, Artificial Sequence
  Synthesized
AQMQPRGSVAQ

SEQ ID NO: 2255 - protein, 11 aa, Artificial Sequence
  Synthesized
AQMQTLGLQAQ

SEQ ID NO: 2256 - protein, 11 aa, Artificial Sequence
  Synthesized
AQMRDSSSSAQ

SEQ ID NO: 2257 - protein, 11 aa, Artificial Sequence
  Synthesized
AQMRHFSFMAQ

SEQ ID NO: 2258 - protein, 11 aa, Artificial Sequence
  Synthesized
AQMRPAASNAQ

SEQ ID NO: 2259 - protein, 11 aa, Artificial Sequence
  Synthesized
AQMRQDTKLAQ

SEQ ID NO: 2260 - protein, 11 aa, Artificial Sequence
  Synthesized
AQMRSRDDHAQ

SEQ ID NO: 2261 - protein, 11 aa, Artificial Sequence
  Synthesized
AQMSGRMAPAQ

SEQ ID NO: 2262 - protein, 11 aa, Artificial Sequence
  Synthesized
AQMSLGASTAQ

SEQ ID NO: 2263 - protein, 11 aa, Artificial Sequence
  Synthesized
AQMSLPRVFAQ

SEQ ID NO: 2264 - protein, 11 aa, Artificial Sequence
  Synthesized
AQMSMQSRSAQ

SEQ ID NO: 2265 - protein, 11 aa, Artificial Sequence
  Synthesized
AQMSPSNKVAQ

SEQ ID NO: 2266 - protein, 11 aa, Artificial Sequence
  Synthesized
AQMSQSSQRAQ

SEQ ID NO: 2267 - protein, 11 aa, Artificial Sequence
  Synthesized
AQMSQTVTKAQ

SEQ ID NO: 2268 - protein, 11 aa, Artificial Sequence
  Synthesized
AQMSRAGAPAQ

SEQ ID NO: 2269 - protein, 11 aa, Artificial Sequence
  Synthesized
AQMSRLNDAAQ

SEQ ID NO: 2270 - protein, 11 aa, Artificial Sequence
  Synthesized
AQMSRTTLGAQ

SEQ ID NO: 2271 - protein, 11 aa, Artificial Sequence
  Synthesized
AQMSSMLSNAQ

SEQ ID NO: 2272 - protein, 11 aa, Artificial Sequence
  Synthesized
AQMSSPSFMAQ

SEQ ID NO: 2273 - protein, 11 aa, Artificial Sequence
  Synthesized
AQMSTLPNVAQ

SEQ ID NO: 2274 - protein, 11 aa, Artificial Sequence
  Synthesized
AQMSTTLSKAQ

SEQ ID NO: 2275 - protein, 11 aa, Artificial Sequence
  Synthesized
AQMTEHKAKAQ

SEQ ID NO: 2276 - protein, 11 aa, Artificial Sequence
  Synthesized
AQMTGKQFLAQ

SEQ ID NO: 2277 - protein, 11 aa, Artificial Sequence
  Synthesized
AQMTGRSNPAQ

SEQ ID NO: 2278 - protein, 11 aa, Artificial Sequence
  Synthesized
AQMTHGASGAQ

SEQ ID NO: 2279 - protein, 11 aa, Artificial Sequence
  Synthesized
AQMTHNVMNAQ

SEQ ID NO: 2280 - protein, 11 aa, Artificial Sequence
  Synthesized
AQMTNRSLTAQ

SEQ ID NO: 2281 - protein, 11 aa, Artificial Sequence
  Synthesized
AQMTQDTKRAQ

SEQ ID NO: 2282 - protein, 11 aa, Artificial Sequence
  Synthesized
AQMTQSSHKAQ

SEQ ID NO: 2283 - protein, 11 aa, Artificial Sequence
  Synthesized
AQMTSTLQSAQ

SEQ ID NO: 2284 - protein, 11 aa, Artificial Sequence
  Synthesized
AQMTTAPNAAQ

SEQ ID NO: 2285 - protein, 11 aa, Artificial Sequence
  Synthesized
AQMVKDLNVAQ

SEQ ID NO: 2286 - protein, 11 aa, Artificial Sequence
  Synthesized
AQMVKDTSAAQ

SEQ ID NO: 2287 - protein, 11 aa, Artificial Sequence
  Synthesized
AQMVKNHAPAQ

SEQ ID NO: 2288 - protein, 11 aa, Artificial Sequence
  Synthesized
AQMVLPRAYAQ

SEQ ID NO: 2289 - protein, 11 aa, Artificial Sequence
  Synthesized
AQMVLPRMNAQ

SEQ ID NO: 2290 - protein, 11 aa, Artificial Sequence
  Synthesized
AQMVNMQEKAQ

SEQ ID NO: 2291 - protein, 11 aa, Artificial Sequence
  Synthesized
AQMVQNPRTAQ

SEQ ID NO: 2292 - protein, 11 aa, Artificial Sequence
  Synthesized
AQMVRGPGTAQ

SEQ ID NO: 2293 - protein, 11 aa, Artificial Sequence
  Synthesized
AQMVRPVEVAQ

SEQ ID NO: 2294 - protein, 11 aa, Artificial Sequence
  Synthesized
AQMVSPRGSAQ

SEQ ID NO: 2295 - protein, 11 aa, Artificial Sequence
  Synthesized
AQNAASGMNAQ

SEQ ID NO: 2296 - protein, 11 aa, Artificial Sequence
  Synthesized
AQNAGGIVRAQ

SEQ ID NO: 2297 - protein, 11 aa, Artificial Sequence
  Synthesized
AQNAGREHHAQ

SEQ ID NO: 2298 - protein, 11 aa, Artificial Sequence
  Synthesized
AQNAGYTTIAQ

SEQ ID NO: 2299 - protein, 11 aa, Artificial Sequence
  Synthesized
AQNAISTSNAQ

SEQ ID NO: 2300 - protein, 11 aa, Artificial Sequence
  Synthesized
AQNAKVGVIAQ

SEQ ID NO: 2301 - protein, 11 aa, Artificial Sequence
  Synthesized
AQNAKVSDQAQ

SEQ ID NO: 2302 - protein, 11 aa, Artificial Sequence
  Synthesized
AQNALHSAQAQ

SEQ ID NO: 2303 - protein, 11 aa, Artificial Sequence
  Synthesized
AQNALMSAGAQ

SEQ ID NO: 2304 - protein, 11 aa, Artificial Sequence
  Synthesized
AQNALPLANAQ

SEQ ID NO: 2305 - protein, 11 aa, Artificial Sequence
  Synthesized
AQNANGKFYAQ

SEQ ID NO: 2306 - protein, 11 aa, Artificial Sequence
  Synthesized
AQNAPALQGAQ

SEQ ID NO: 2307 - protein, 11 aa, Artificial Sequence
  Synthesized
AQNAQDPSPAQ

SEQ ID NO: 2308 - protein, 11 aa, Artificial Sequence
  Synthesized
AQNARIHQAAQ

SEQ ID NO: 2309 - protein, 11 aa, Artificial Sequence
  Synthesized
AQNARRDRPAQ

SEQ ID NO: 2310 - protein, 11 aa, Artificial Sequence
  Synthesized
AQNASVKLNAQ

SEQ ID NO: 2311 - protein, 11 aa, Artificial Sequence
  Synthesized
AQNATERPRAQ

SEQ ID NO: 2312 - protein, 11 aa, Artificial Sequence
  Synthesized
AQNAVRDTVAQ

SEQ ID NO: 2313 - protein, 11 aa, Artificial Sequence
  Synthesized
AQNAVRSSSAQ

SEQ ID NO: 2314 - protein, 11 aa, Artificial Sequence
  Synthesized
AQNAVSSGSAQ

SEQ ID NO: 2315 - protein, 11 aa, Artificial Sequence
  Synthesized
AQNDAFRAQAQ

SEQ ID NO: 2316 - protein, 11 aa, Artificial Sequence
  Synthesized
AQNDFQRTKAQ

SEQ ID NO: 2317 - protein, 11 aa, Artificial Sequence
  Synthesized
AQNDRLLINAQ

SEQ ID NO: 2318 - protein, 11 aa, Artificial Sequence
  Synthesized
AQNEKHSVSAQ

SEQ ID NO: 2319 - protein, 11 aa, Artificial Sequence
  Synthesized
AQNESITRNAQ

SEQ ID NO: 2320 - protein, 11 aa, Artificial Sequence
  Synthesized
AQNFHPGDRAQ

SEQ ID NO: 2321 - protein, 11 aa, Artificial Sequence
  Synthesized
AQNFLPQGEAQ

SEQ ID NO: 2322 - protein, 11 aa, Artificial Sequence
  Synthesized
AQNFLPRYPAQ

SEQ ID NO: 2323 - protein, 11 aa, Artificial Sequence
  Synthesized
AQNFNKQNSAQ

SEQ ID NO: 2324 - protein, 11 aa, Artificial Sequence
  Synthesized
AQNFQTMQTAQ

SEQ ID NO: 2325 - protein, 11 aa, Artificial Sequence
  Synthesized
AQNFRDNLTAQ

SEQ ID NO: 2326 - protein, 11 aa, Artificial Sequence
  Synthesized
AQNGAELPRAQ

SEQ ID NO: 2327 - protein, 11 aa, Artificial Sequence
  Synthesized
AQNGGTLRGAQ

SEQ ID NO: 2328 - protein, 11 aa, Artificial Sequence
  Synthesized
AQNGHTLFTAQ

SEQ ID NO: 2329 - protein, 11 aa, Artificial Sequence
  Synthesized
AQNGLPDVPAQ

SEQ ID NO: 2330 - protein, 11 aa, Artificial Sequence
  Synthesized
AQNGLPRHKAQ

SEQ ID NO: 2331 - protein, 11 aa, Artificial Sequence
  Synthesized
AQNGMTLRNAQ

SEQ ID NO: 2332 - protein, 11 aa, Artificial Sequence
  Synthesized
AQNGPTRLAAQ

SEQ ID NO: 2333 - protein, 11 aa, Artificial Sequence
  Synthesized
AQNGPTTIRAQ

SEQ ID NO: 2334 - protein, 11 aa, Artificial Sequence
  Synthesized
AQNGPVGRIAQ

SEQ ID NO: 2335 - protein, 11 aa, Artificial Sequence
  Synthesized
AQNGSKKISAQ

SEQ ID NO: 2336 - protein, 11 aa, Artificial Sequence
  Synthesized
AQNGSKTIPAQ

SEQ ID NO: 2337 - protein, 11 aa, Artificial Sequence
  Synthesized
AQNGSKTITAQ

SEQ ID NO: 2338 - protein, 11 aa, Artificial Sequence
  Synthesized
AQNGSMRAYAQ

SEQ ID NO: 2339 - protein, 11 aa, Artificial Sequence
  Synthesized
AQNGSRGAAAQ

SEQ ID NO: 2340 - protein, 11 aa, Artificial Sequence
  Synthesized
AQNGSRPQIAQ

SEQ ID NO: 2341 - protein, 11 aa, Artificial Sequence
  Synthesized
AQNGSRVIAAQ

SEQ ID NO: 2342 - protein, 11 aa, Artificial Sequence
  Synthesized
AQNGTRMTSAQ

SEQ ID NO: 2343 - protein, 11 aa, Artificial Sequence
  Synthesized
AQNGYKTISAQ

SEQ ID NO: 2344 - protein, 11 aa, Artificial Sequence
  Synthesized
AQNHLPRDPAQ

SEQ ID NO: 2345 - protein, 11 aa, Artificial Sequence
  Synthesized
AQNHLPRNLAQ

SEQ ID NO: 2346 - protein, 11 aa, Artificial Sequence
  Synthesized
AQNHLPSAMAQ

SEQ ID NO: 2347 - protein, 11 aa, Artificial Sequence
  Synthesized
AQNHRSSISAQ

SEQ ID NO: 2348 - protein, 11 aa, Artificial Sequence
  Synthesized
AQNHVAGTFAQ

SEQ ID NO: 2349 - protein, 11 aa, Artificial Sequence
  Synthesized
AQNIGPVHKAQ

SEQ ID NO: 2350 - protein, 11 aa, Artificial Sequence
  Synthesized
AQNIGYASPAQ

SEQ ID NO: 2351 - protein, 11 aa, Artificial Sequence
  Synthesized
AQNIHSASSAQ

SEQ ID NO: 2352 - protein, 11 aa, Artificial Sequence
  Synthesized
AQNIHSSVGAQ

SEQ ID NO: 2353 - protein, 11 aa, Artificial Sequence
  Synthesized
AQNIPGGMIAQ

SEQ ID NO: 2354 - protein, 11 aa, Artificial Sequence
  Synthesized
AQNIQTVNNAQ

SEQ ID NO: 2355 - protein, 11 aa, Artificial Sequence
  Synthesized
AQNIVGKFEAQ

SEQ ID NO: 2356 - protein, 11 aa, Artificial Sequence
  Synthesized
AQNKGFQDAAQ

SEQ ID NO: 2357 - protein, 11 aa, Artificial Sequence
  Synthesized
AQNKHGSFMAQ

SEQ ID NO: 2358 - protein, 11 aa, Artificial Sequence
  Synthesized
AQNKKGSAMAQ

SEQ ID NO: 2359 - protein, 11 aa, Artificial Sequence
  Synthesized
AQNKMSLAVAQ

SEQ ID NO: 2360 - protein, 11 aa, Artificial Sequence
  Synthesized
AQNKPAFPQAQ

SEQ ID NO: 2361 - protein, 11 aa, Artificial Sequence
  Synthesized
AQNKQNTSIAQ

SEQ ID NO: 2362 - protein, 11 aa, Artificial Sequence
  Synthesized
AQNKTAVTAAQ

SEQ ID NO: 2363 - protein, 11 aa, Artificial Sequence
  Synthesized
AQNLADSRIAQ

SEQ ID NO: 2364 - protein, 11 aa, Artificial Sequence
  Synthesized
AQNLAREPKAQ

SEQ ID NO: 2365 - protein, 11 aa, Artificial Sequence
  Synthesized
AQNLARNLSAQ

SEQ ID NO: 2366 - protein, 11 aa, Artificial Sequence
  Synthesized
AQNLARPHSAQ

SEQ ID NO: 2367 - protein, 11 aa, Artificial Sequence
  Synthesized
AQNLGELSNAQ

SEQ ID NO: 2368 - protein, 11 aa, Artificial Sequence
  Synthesized
AQNLHNVPEAQ

SEQ ID NO: 2369 - protein, 11 aa, Artificial Sequence
  Synthesized
AQNLHVIQNAQ

SEQ ID NO: 2370 - protein, 11 aa, Artificial Sequence
  Synthesized
AQNLILNGPAQ

SEQ ID NO: 2371 - protein, 11 aa, Artificial Sequence
  Synthesized
AQNLLPGVHAQ

SEQ ID NO: 2372 - protein, 11 aa, Artificial Sequence
  Synthesized
AQNLLRNSPAQ

SEQ ID NO: 2373 - protein, 11 aa, Artificial Sequence
  Synthesized
AQNLLTTHQAQ

SEQ ID NO: 2374 - protein, 11 aa, Artificial Sequence
  Synthesized
AQNLMENSRAQ

SEQ ID NO: 2375 - protein, 11 aa, Artificial Sequence
  Synthesized
AQNLMKGQNAQ

SEQ ID NO: 2376 - protein, 11 aa, Artificial Sequence
  Synthesized
AQNLNVQKSAQ

SEQ ID NO: 2377 - protein, 11 aa, Artificial Sequence
  Synthesized
AQNLPITVVAQ

SEQ ID NO: 2378 - protein, 11 aa, Artificial Sequence
  Synthesized
AQNLPRTVEAQ

SEQ ID NO: 2379 - protein, 11 aa, Artificial Sequence
  Synthesized
AQNLQKIPAAQ

SEQ ID NO: 2380 - protein, 11 aa, Artificial Sequence
  Synthesized
AQNLQVSKEAQ

SEQ ID NO: 2381 - protein, 11 aa, Artificial Sequence
  Synthesized
AQNLTNSMKAQ

SEQ ID NO: 2382 - protein, 11 aa, Artificial Sequence
  Synthesized
AQNLTRHLPAQ

SEQ ID NO: 2383 - protein, 11 aa, Artificial Sequence
  Synthesized
AQNLVPQSRAQ

SEQ ID NO: 2384 - protein, 11 aa, Artificial Sequence
  Synthesized
AQNLVSSEKAQ

SEQ ID NO: 2385 - protein, 11 aa, Artificial Sequence
  Synthesized
AQNLVVDHYAQ

SEQ ID NO: 2386 - protein, 11 aa, Artificial Sequence
  Synthesized
AQNMHNSILAQ

SEQ ID NO: 2387 - protein, 11 aa, Artificial Sequence
  Synthesized
AQNMHQISAAQ

SEQ ID NO: 2388 - protein, 11 aa, Artificial Sequence
  Synthesized
AQNMNNSFMAQ

SEQ ID NO: 2389 - protein, 11 aa, Artificial Sequence
  Synthesized
AQNMNPRGDAQ

SEQ ID NO: 2390 - protein, 11 aa, Artificial Sequence
  Synthesized
AQNMPRTGQAQ

SEQ ID NO: 2391 - protein, 11 aa, Artificial Sequence
  Synthesized
AQNMPRTIPAQ

SEQ ID NO: 2392 - protein, 11 aa, Artificial Sequence
  Synthesized
AQNMQYTKSAQ

SEQ ID NO: 2393 - protein, 11 aa, Artificial Sequence
  Synthesized
AQNMSLKTDAQ

SEQ ID NO: 2394 - protein, 11 aa, Artificial Sequence
  Synthesized
AQNNATRFLAQ

SEQ ID NO: 2395 - protein, 11 aa, Artificial Sequence
  Synthesized
AQNNATRHFAQ

SEQ ID NO: 2396 - protein, 11 aa, Artificial Sequence
  Synthesized
AQNNFTRVEAQ

SEQ ID NO: 2397 - protein, 11 aa, Artificial Sequence
  Synthesized
AQNNGTRYFAQ

SEQ ID NO: 2398 - protein, 11 aa, Artificial Sequence
  Synthesized
AQNNHTRRMAQ

SEQ ID NO: 2399 - protein, 11 aa, Artificial Sequence
  Synthesized
AQNNIGHQRAQ

SEQ ID NO: 2400 - protein, 11 aa, Artificial Sequence
  Synthesized
AQNNIQPVNAQ

SEQ ID NO: 2401 - protein, 11 aa, Artificial Sequence
  Synthesized
AQNNKTRLHAQ

SEQ ID NO: 2402 - protein, 11 aa, Artificial Sequence
  Synthesized
AQNNLMSMKAQ

SEQ ID NO: 2403 - protein, 11 aa, Artificial Sequence
  Synthesized
AQNNMTRQTAQ

SEQ ID NO: 2404 - protein, 11 aa, Artificial Sequence
  Synthesized
AQNNNTALPAQ

SEQ ID NO: 2405 - protein, 11 aa, Artificial Sequence
  Synthesized
AQNNNTHYGAQ

SEQ ID NO: 2406 - protein, 11 aa, Artificial Sequence
  Synthesized
AQNNNTKPSAQ

SEQ ID NO: 2407 - protein, 11 aa, Artificial Sequence
  Synthesized
AQNNNTRFYAQ

SEQ ID NO: 2408 - protein, 11 aa, Artificial Sequence
  Synthesized
AQNNNTRTKAQ

SEQ ID NO: 2409 - protein, 11 aa, Artificial Sequence
  Synthesized
AQNNPKRRSAQ

SEQ ID NO: 2410 - protein, 11 aa, Artificial Sequence
  Synthesized
AQNNPTRPHAQ

SEQ ID NO: 2411 - protein, 11 aa, Artificial Sequence
  Synthesized
AQNNPTRPSAQ

SEQ ID NO: 2412 - protein, 11 aa, Artificial Sequence
  Synthesized
AQNNPVHRSAQ

SEQ ID NO: 2413 - protein, 11 aa, Artificial Sequence
  Synthesized
AQNNPVNRSAQ

SEQ ID NO: 2414 - protein, 11 aa, Artificial Sequence
  Synthesized
AQNNPVPRSAQ

SEQ ID NO: 2415 - protein, 11 aa, Artificial Sequence
  Synthesized
AQNNPVTRTAQ

SEQ ID NO: 2416 - protein, 11 aa, Artificial Sequence
  Synthesized
AQNNQLTRSAQ

SEQ ID NO: 2417 - protein, 11 aa, Artificial Sequence
  Synthesized
AQNNRISANAQ

SEQ ID NO: 2418 - protein, 11 aa, Artificial Sequence
  Synthesized
AQNNRITSNAQ

SEQ ID NO: 2419 - protein, 11 aa, Artificial Sequence
  Synthesized
AQNNRTRAHAQ

SEQ ID NO: 2420 - protein, 11 aa, Artificial Sequence
  Synthesized
AQNNRTRHYAQ

SEQ ID NO: 2421 - protein, 11 aa, Artificial Sequence
  Synthesized
AQNNSGLAKAQ

SEQ ID NO: 2422 - protein, 11 aa, Artificial Sequence
  Synthesized
AQNNVVRSTAQ

SEQ ID NO: 2423 - protein, 11 aa, Artificial Sequence
  Synthesized
AQNPALYSDAQ

SEQ ID NO: 2424 - protein, 11 aa, Artificial Sequence
  Synthesized
AQNPASLITAQ

SEQ ID NO: 2425 - protein, 11 aa, Artificial Sequence
  Synthesized
AQNPASNREAQ

SEQ ID NO: 2426 - protein, 11 aa, Artificial Sequence
  Synthesized
AQNPGRPYHAQ

SEQ ID NO: 2427 - protein, 11 aa, Artificial Sequence
  Synthesized
AQNPGRVSLAQ

SEQ ID NO: 2428 - protein, 11 aa, Artificial Sequence
  Synthesized
AQNPIRGNAAQ

SEQ ID NO: 2429 - protein, 11 aa, Artificial Sequence
  Synthesized
AQNPKVISSAQ

SEQ ID NO: 2430 - protein, 11 aa, Artificial Sequence
  Synthesized
AQNPLPRGDAQ

SEQ ID NO: 2431 - protein, 11 aa, Artificial Sequence
  Synthesized
AQNPLPRHKAQ

SEQ ID NO: 2432 - protein, 11 aa, Artificial Sequence
  Synthesized
AQNPLPRHVAQ

SEQ ID NO: 2433 - protein, 11 aa, Artificial Sequence
  Synthesized
AQNPLSVNRAQ

SEQ ID NO: 2434 - protein, 11 aa, Artificial Sequence
  Synthesized
AQNPSKLHTAQ

SEQ ID NO: 2435 - protein, 11 aa, Artificial Sequence
  Synthesized
AQNPSRTVGAQ

SEQ ID NO: 2436 - protein, 11 aa, Artificial Sequence
  Synthesized
AQNPSSQSDAQ

SEQ ID NO: 2437 - protein, 11 aa, Artificial Sequence
  Synthesized
AQNPSTSKYAQ

SEQ ID NO: 2438 - protein, 11 aa, Artificial Sequence
  Synthesized
AQNPTRSLSAQ

SEQ ID NO: 2439 - protein, 11 aa, Artificial Sequence
  Synthesized
AQNQDRPHSAQ

SEQ ID NO: 2440 - protein, 11 aa, Artificial Sequence
  Synthesized
AQNQFKQGAAQ

SEQ ID NO: 2441 - protein, 11 aa, Artificial Sequence
  Synthesized
AQNQKPSLLAQ

SEQ ID NO: 2442 - protein, 11 aa, Artificial Sequence
  Synthesized
AQNQKQVTTAQ

SEQ ID NO: 2443 - protein, 11 aa, Artificial Sequence
  Synthesized
AQNQLAPKSAQ

SEQ ID NO: 2444 - protein, 11 aa, Artificial Sequence
  Synthesized
AQNQLLRQGAQ

SEQ ID NO: 2445 - protein, 11 aa, Artificial Sequence
  Synthesized
AQNQLMIPDAQ

SEQ ID NO: 2446 - protein, 11 aa, Artificial Sequence
  Synthesized
AQNQLQMEIAQ

SEQ ID NO: 2447 - protein, 11 aa, Artificial Sequence
  Synthesized
AQNQLRREEAQ

SEQ ID NO: 2448 - protein, 11 aa, Artificial Sequence
  Synthesized
AQNQPSAQMAQ

SEQ ID NO: 2449 - protein, 11 aa, Artificial Sequence
  Synthesized
AQNQSQYTKAQ

SEQ ID NO: 2450 - protein, 11 aa, Artificial Sequence
  Synthesized
AQNQSSVKSAQ

SEQ ID NO: 2451 - protein, 11 aa, Artificial Sequence
  Synthesized
AQNQSYTHMAQ

SEQ ID NO: 2452 - protein, 11 aa, Artificial Sequence
  Synthesized
AQNQTKQGLAQ

SEQ ID NO: 2453 - protein, 11 aa, Artificial Sequence
  Synthesized
AQNRLAPTIAQ

SEQ ID NO: 2454 - protein, 11 aa, Artificial Sequence
  Synthesized
AQNRLPNDAAQ

SEQ ID NO: 2455 - protein, 11 aa, Artificial Sequence
  Synthesized
AQNRLPRGLAQ

SEQ ID NO: 2456 - protein, 11 aa, Artificial Sequence
  Synthesized
AQNRSDGAQAQ

SEQ ID NO: 2457 - protein, 11 aa, Artificial Sequence
  Synthesized
AQNRSKTISAQ

SEQ ID NO: 2458 - protein, 11 aa, Artificial Sequence
  Synthesized
AQNRSSDTTAQ

SEQ ID NO: 2459 - protein, 11 aa, Artificial Sequence
  Synthesized
AQNRVAQGEAQ

SEQ ID NO: 2460 - protein, 11 aa, Artificial Sequence
  Synthesized
AQNRVLNVDAQ

SEQ ID NO: 2461 - protein, 11 aa, Artificial Sequence
  Synthesized
AQNSASRLTAQ

SEQ ID NO: 2462 - protein, 11 aa, Artificial Sequence
  Synthesized
AQNSGLTMKAQ

SEQ ID NO: 2463 - protein, 11 aa, Artificial Sequence
  Synthesized
AQNSGNWQSAQ

SEQ ID NO: 2464 - protein, 11 aa, Artificial Sequence
  Synthesized
AQNSGQYATAQ

SEQ ID NO: 2465 - protein, 11 aa, Artificial Sequence
  Synthesized
AQNSGRSGLAQ

SEQ ID NO: 2466 - protein, 11 aa, Artificial Sequence
  Synthesized
AQNSGRTIGAQ

SEQ ID NO: 2467 - protein, 11 aa, Artificial Sequence
  Synthesized
AQNSHPVSTAQ

SEQ ID NO: 2468 - protein, 11 aa, Artificial Sequence
  Synthesized
AQNSIRSNNAQ

SEQ ID NO: 2469 - protein, 11 aa, Artificial Sequence
  Synthesized
AQNSLDTMAAQ

SEQ ID NO: 2470 - protein, 11 aa, Artificial Sequence
  Synthesized
AQNSLGQHKAQ

SEQ ID NO: 2471 - protein, 11 aa, Artificial Sequence
  Synthesized
AQNSLMTEPAQ

SEQ ID NO: 2472 - protein, 11 aa, Artificial Sequence
  Synthesized
AQNSLNAMSAQ

SEQ ID NO: 2473 - protein, 11 aa, Artificial Sequence
  Synthesized
AQNSLPRQDAQ

SEQ ID NO: 2474 - protein, 11 aa, Artificial Sequence
  Synthesized
AQNSMHTTRAQ

SEQ ID NO: 2475 - protein, 11 aa, Artificial Sequence
  Synthesized
AQNSMRADVAQ

SEQ ID NO: 2476 - protein, 11 aa, Artificial Sequence
  Synthesized
AQNSPLPRQAQ

SEQ ID NO: 2477 - protein, 11 aa, Artificial Sequence
  Synthesized
AQNSQMKYAAQ

SEQ ID NO: 2478 - protein, 11 aa, Artificial Sequence
  Synthesized
AQNSQTPHRAQ

SEQ ID NO: 2479 - protein, 11 aa, Artificial Sequence
  Synthesized
AQNSRLAASAQ

SEQ ID NO: 2480 - protein, 11 aa, Artificial Sequence
  Synthesized
AQNSRLNTAAQ

SEQ ID NO: 2481 - protein, 11 aa, Artificial Sequence
  Synthesized
AQNSRPSSNAQ

SEQ ID NO: 2482 - protein, 11 aa, Artificial Sequence
  Synthesized
AQNSRSVIGAQ

SEQ ID NO: 2483 - protein, 11 aa, Artificial Sequence
  Synthesized
AQNSRVLNAAQ

SEQ ID NO: 2484 - protein, 11 aa, Artificial Sequence
  Synthesized
AQNSRVNLHAQ

SEQ ID NO: 2485 - protein, 11 aa, Artificial Sequence
  Synthesized
AQNSSAFTSAQ

SEQ ID NO: 2486 - protein, 11 aa, Artificial Sequence
  Synthesized
AQNSSKLALAQ

SEQ ID NO: 2487 - protein, 11 aa, Artificial Sequence
  Synthesized
AQNSSPLLPAQ

SEQ ID NO: 2488 - protein, 11 aa, Artificial Sequence
  Synthesized
AQNSSRLPSAQ

SEQ ID NO: 2489 - protein, 11 aa, Artificial Sequence
  Synthesized
AQNSSRTNLAQ

SEQ ID NO: 2490 - protein, 11 aa, Artificial Sequence
  Synthesized
AQNSTMTGRAQ

SEQ ID NO: 2491 - protein, 11 aa, Artificial Sequence
  Synthesized
AQNSTRTSLAQ

SEQ ID NO: 2492 - protein, 11 aa, Artificial Sequence
  Synthesized
AQNSVKLDIAQ

SEQ ID NO: 2493 - protein, 11 aa, Artificial Sequence
  Synthesized
AQNSVKQTTAQ

SEQ ID NO: 2494 - protein, 11 aa, Artificial Sequence
  Synthesized
AQNSVVARGAQ

SEQ ID NO: 2495 - protein, 11 aa, Artificial Sequence
  Synthesized
AQNSYITHQAQ

SEQ ID NO: 2496 - protein, 11 aa, Artificial Sequence
  Synthesized
AQNTAVNKYAQ

SEQ ID NO: 2497 - protein, 11 aa, Artificial Sequence
  Synthesized
AQNTGFSAMAQ

SEQ ID NO: 2498 - protein, 11 aa, Artificial Sequence
  Synthesized
AQNTHTQGRAQ

SEQ ID NO: 2499 - protein, 11 aa, Artificial Sequence
  Synthesized
AQNTIPSSAAQ

SEQ ID NO: 2500 - protein, 11 aa, Artificial Sequence
  Synthesized
AQNTIQLTAAQ

SEQ ID NO: 2501 - protein, 11 aa, Artificial Sequence
  Synthesized
AQNTKPANVAQ

SEQ ID NO: 2502 - protein, 11 aa, Artificial Sequence
  Synthesized
AQNTLATLSAQ

SEQ ID NO: 2503 - protein, 11 aa, Artificial Sequence
  Synthesized
AQNTLTDTKAQ

SEQ ID NO: 2504 - protein, 11 aa, Artificial Sequence
  Synthesized
AQNTNITMKAQ

SEQ ID NO: 2505 - protein, 11 aa, Artificial Sequence
  Synthesized
AQNTPPDRKAQ

SEQ ID NO: 2506 - protein, 11 aa, Artificial Sequence
  Synthesized
AQNTQRDVMAQ

SEQ ID NO: 2507 - protein, 11 aa, Artificial Sequence
  Synthesized
AQNTRDALSAQ

SEQ ID NO: 2508 - protein, 11 aa, Artificial Sequence
  Synthesized
AQNTRGVSSAQ

SEQ ID NO: 2509 - protein, 11 aa, Artificial Sequence
  Synthesized
AQNTRTSLPAQ

SEQ ID NO: 2510 - protein, 11 aa, Artificial Sequence
  Synthesized
AQNTSHRDQAQ

SEQ ID NO: 2511 - protein, 11 aa, Artificial Sequence
  Synthesized
AQNTTGRTMAQ

SEQ ID NO: 2512 - protein, 11 aa, Artificial Sequence
  Synthesized
AQNTTKAPLAQ

SEQ ID NO: 2513 - protein, 11 aa, Artificial Sequence
  Synthesized
AQNTTSRSGAQ

SEQ ID NO: 2514 - protein, 11 aa, Artificial Sequence
  Synthesized
AQNTTSRTPAQ

SEQ ID NO: 2515 - protein, 11 aa, Artificial Sequence
  Synthesized
AQNTVNKLQAQ

SEQ ID NO: 2516 - protein, 11 aa, Artificial Sequence
  Synthesized
AQNVADRAVAQ

SEQ ID NO: 2517 - protein, 11 aa, Artificial Sequence
  Synthesized
AQNVFNAAPAQ

SEQ ID NO: 2518 - protein, 11 aa, Artificial Sequence
  Synthesized
AQNVGHAELAQ

SEQ ID NO: 2519 - protein, 11 aa, Artificial Sequence
  Synthesized
AQNVGSSSRAQ

SEQ ID NO: 2520 - protein, 11 aa, Artificial Sequence
  Synthesized
AQNVKDRTMAQ

SEQ ID NO: 2521 - protein, 11 aa, Artificial Sequence
  Synthesized
AQNVKQAGPAQ

SEQ ID NO: 2522 - protein, 11 aa, Artificial Sequence
  Synthesized
AQNVKSGTTAQ

SEQ ID NO: 2523 - protein, 11 aa, Artificial Sequence
  Synthesized
AQNVMMRSEAQ

SEQ ID NO: 2524 - protein, 11 aa, Artificial Sequence
  Synthesized
AQNVMPHRSAQ

SEQ ID NO: 2525 - protein, 11 aa, Artificial Sequence
  Synthesized
AQNVNRTSGAQ

SEQ ID NO: 2526 - protein, 11 aa, Artificial Sequence
  Synthesized
AQNVPTRSAAQ

SEQ ID NO: 2527 - protein, 11 aa, Artificial Sequence
  Synthesized
AQNVQIPQKAQ

SEQ ID NO: 2528 - protein, 11 aa, Artificial Sequence
  Synthesized
AQNVQPQTIAQ

SEQ ID NO: 2529 - protein, 11 aa, Artificial Sequence
  Synthesized
AQNVRNVLDAQ

SEQ ID NO: 2530 - protein, 11 aa, Artificial Sequence
  Synthesized
AQNVRPSNDAQ

SEQ ID NO: 2531 - protein, 11 aa, Artificial Sequence
  Synthesized
AQNVRSQIPAQ

SEQ ID NO: 2532 - protein, 11 aa, Artificial Sequence
  Synthesized
AQNVSKTISAQ

SEQ ID NO: 2533 - protein, 11 aa, Artificial Sequence
  Synthesized
AQNVTMNVRAQ

SEQ ID NO: 2534 - protein, 11 aa, Artificial Sequence
  Synthesized
AQNVVMKASAQ

SEQ ID NO: 2535 - protein, 11 aa, Artificial Sequence
  Synthesized
AQNVVSGRNAQ

SEQ ID NO: 2536 - protein, 11 aa, Artificial Sequence
  Synthesized
AQNYLPHGHAQ

SEQ ID NO: 2537 - protein, 11 aa, Artificial Sequence
  Synthesized
AQNYLPTPQAQ

SEQ ID NO: 2538 - protein, 11 aa, Artificial Sequence
  Synthesized
AQNYRHSAMAQ

SEQ ID NO: 2539 - protein, 11 aa, Artificial Sequence
  Synthesized
AQNYRPNMPAQ

SEQ ID NO: 2540 - protein, 11 aa, Artificial Sequence
  Synthesized
AQNYSIGDPAQ

SEQ ID NO: 2541 - protein, 11 aa, Artificial Sequence
  Synthesized
AQPAAQRHTAQ

SEQ ID NO: 2542 - protein, 11 aa, Artificial Sequence
  Synthesized
AQPAESSAMAQ

SEQ ID NO: 2543 - protein, 11 aa, Artificial Sequence
  Synthesized
AQPAGRTSLAQ

SEQ ID NO: 2544 - protein, 11 aa, Artificial Sequence
  Synthesized
AQPAKTITTAQ

SEQ ID NO: 2545 - protein, 11 aa, Artificial Sequence
  Synthesized
AQPALPIQYAQ

SEQ ID NO: 2546 - protein, 11 aa, Artificial Sequence
  Synthesized
AQPALPRGHAQ

SEQ ID NO: 2547 - protein, 11 aa, Artificial Sequence
  Synthesized
AQPALPRGNAQ

SEQ ID NO: 2548 - protein, 11 aa, Artificial Sequence
  Synthesized
AQPALPRLHAQ

SEQ ID NO: 2549 - protein, 11 aa, Artificial Sequence
  Synthesized
AQPALPYHGAQ

SEQ ID NO: 2550 - protein, 11 aa, Artificial Sequence
  Synthesized
AQPANHSMNAQ

SEQ ID NO: 2551 - protein, 11 aa, Artificial Sequence
  Synthesized
AQPANYSAMAQ

SEQ ID NO: 2552 - protein, 11 aa, Artificial Sequence
  Synthesized
AQPAPPRGNAQ

SEQ ID NO: 2553 - protein, 11 aa, Artificial Sequence
  Synthesized
AQPAQKTMPAQ

SEQ ID NO: 2554 - protein, 11 aa, Artificial Sequence
  Synthesized
AQPAQRPQMAQ

SEQ ID NO: 2555 - protein, 11 aa, Artificial Sequence
  Synthesized
AQPARHSAMAQ

SEQ ID NO: 2556 - protein, 11 aa, Artificial Sequence
  Synthesized
AQPAVVSAMAQ

SEQ ID NO: 2557 - protein, 11 aa, Artificial Sequence
  Synthesized
AQPDDASFMAQ

SEQ ID NO: 2558 - protein, 11 aa, Artificial Sequence
  Synthesized
AQPDLPPFFAQ

SEQ ID NO: 2559 - protein, 11 aa, Artificial Sequence
  Synthesized
AQPDQNSFMAQ

SEQ ID NO: 2560 - protein, 11 aa, Artificial Sequence
  Synthesized
AQPDVFSFMAQ

SEQ ID NO: 2561 - protein, 11 aa, Artificial Sequence
  Synthesized
AQPELPMGGAQ

SEQ ID NO: 2562 - protein, 11 aa, Artificial Sequence
  Synthesized
AQPELPRFYAQ

SEQ ID NO: 2563 - protein, 11 aa, Artificial Sequence
  Synthesized
AQPENRNVSAQ

SEQ ID NO: 2564 - protein, 11 aa, Artificial Sequence
  Synthesized
AQPERLKIVAQ

SEQ ID NO: 2565 - protein, 11 aa, Artificial Sequence
  Synthesized
AQPFGTTVSAQ

SEQ ID NO: 2566 - protein, 11 aa, Artificial Sequence
  Synthesized
AQPFKGVGGAQ

SEQ ID NO: 2567 - protein, 11 aa, Artificial Sequence
  Synthesized
AQPFKPSFMAQ

SEQ ID NO: 2568 - protein, 11 aa, Artificial Sequence
  Synthesized
AQPFLPFQIAQ

SEQ ID NO: 2569 - protein, 11 aa, Artificial Sequence
  Synthesized
AQPFLPHTPAQ

SEQ ID NO: 2570 - protein, 11 aa, Artificial Sequence
  Synthesized
AQPFLPRYGAQ

SEQ ID NO: 2571 - protein, 11 aa, Artificial Sequence
  Synthesized
AQPGAPSAMAQ

SEQ ID NO: 2572 - protein, 11 aa, Artificial Sequence
  Synthesized
AQPGARGVGAQ

SEQ ID NO: 2573 - protein, 11 aa, Artificial Sequence
  Synthesized
AQPGARLPTAQ

SEQ ID NO: 2574 - protein, 11 aa, Artificial Sequence
  Synthesized
AQPGDSGKMAQ

SEQ ID NO: 2575 - protein, 11 aa, Artificial Sequence
  Synthesized
AQPGGLSFMAQ

SEQ ID NO: 2576 - protein, 11 aa, Artificial Sequence
  Synthesized
AQPGHNSFMAQ

SEQ ID NO: 2577 - protein, 11 aa, Artificial Sequence
  Synthesized
AQPGIPGGSAQ

SEQ ID NO: 2578 - protein, 11 aa, Artificial Sequence
  Synthesized
AQPGIPSFMAQ

SEQ ID NO: 2579 - protein, 11 aa, Artificial Sequence
  Synthesized
AQPGKQSFNAQ

SEQ ID NO: 2580 - protein, 11 aa, Artificial Sequence
  Synthesized
AQPGLPKPYAQ

SEQ ID NO: 2581 - protein, 11 aa, Artificial Sequence
  Synthesized
AQPGLPRGPAQ

SEQ ID NO: 2582 - protein, 11 aa, Artificial Sequence
  Synthesized
AQPGMSARTAQ

SEQ ID NO: 2583 - protein, 11 aa, Artificial Sequence
  Synthesized
AQPGRGVIGAQ

SEQ ID NO: 2584 - protein, 11 aa, Artificial Sequence
  Synthesized
AQPGRNGSAAQ

SEQ ID NO: 2585 - protein, 11 aa, Artificial Sequence
  Synthesized
AQPGRQNAEAQ

SEQ ID NO: 2586 - protein, 11 aa, Artificial Sequence
  Synthesized
AQPGTGSFMAQ

SEQ ID NO: 2587 - protein, 11 aa, Artificial Sequence
  Synthesized
AQPGVGKQPAQ

SEQ ID NO: 2588 - protein, 11 aa, Artificial Sequence
  Synthesized
AQPGVNATRAQ

SEQ ID NO: 2589 - protein, 11 aa, Artificial Sequence
  Synthesized
AQPHGSQNMAQ

SEQ ID NO: 2590 - protein, 11 aa, Artificial Sequence
  Synthesized
AQPHGTRVGAQ

SEQ ID NO: 2591 - protein, 11 aa, Artificial Sequence
  Synthesized
AQPHHASKIAQ

SEQ ID NO: 2592 - protein, 11 aa, Artificial Sequence
  Synthesized
AQPHHFSAMAQ

SEQ ID NO: 2593 - protein, 11 aa, Artificial Sequence
  Synthesized
AQPHHGSFMAQ

SEQ ID NO: 2594 - protein, 11 aa, Artificial Sequence
  Synthesized
AQPHHMSFMAQ

SEQ ID NO: 2595 - protein, 11 aa, Artificial Sequence
  Synthesized
AQPHHSSFMAQ

SEQ ID NO: 2596 - protein, 11 aa, Artificial Sequence
  Synthesized
AQPHKKSFMAQ

SEQ ID NO: 2597 - protein, 11 aa, Artificial Sequence
  Synthesized
AQPHLPFKYAQ

SEQ ID NO: 2598 - protein, 11 aa, Artificial Sequence
  Synthesized
AQPHLPKAYAQ

SEQ ID NO: 2599 - protein, 11 aa, Artificial Sequence
  Synthesized
AQPHLPKGKAQ

SEQ ID NO: 2600 - protein, 11 aa, Artificial Sequence
  Synthesized
AQPHLPPKEAQ

SEQ ID NO: 2601 - protein, 11 aa, Artificial Sequence
  Synthesized
AQPHLPRFAAQ

SEQ ID NO: 2602 - protein, 11 aa, Artificial Sequence
  Synthesized
AQPHLPRGPAQ

SEQ ID NO: 2603 - protein, 11 aa, Artificial Sequence
  Synthesized
AQPHLPRHRAQ

SEQ ID NO: 2604 - protein, 11 aa, Artificial Sequence
  Synthesized
AQPHLPRMKAQ

SEQ ID NO: 2605 - protein, 11 aa, Artificial Sequence
  Synthesized
AQPHRHSAMAQ

SEQ ID NO: 2606 - protein, 11 aa, Artificial Sequence
  Synthesized
AQPHTVNSHAQ

SEQ ID NO: 2607 - protein, 11 aa, Artificial Sequence
  Synthesized
AQPIATGNVAQ

SEQ ID NO: 2608 - protein, 11 aa, Artificial Sequence
  Synthesized
AQPIDKSAMAQ

SEQ ID NO: 2609 - protein, 11 aa, Artificial Sequence
  Synthesized
AQPIGISFMAQ

SEQ ID NO: 2610 - protein, 11 aa, Artificial Sequence
  Synthesized
AQPILDDNPAQ

SEQ ID NO: 2611 - protein, 11 aa, Artificial Sequence
  Synthesized
AQPILDDNQAQ

SEQ ID NO: 2612 - protein, 11 aa, Artificial Sequence
  Synthesized
AQPILDDNTAQ

SEQ ID NO: 2613 - protein, 11 aa, Artificial Sequence
  Synthesized
AQPILPIPRAQ

SEQ ID NO: 2614 - protein, 11 aa, Artificial Sequence
  Synthesized
AQPKAPSFMAQ

SEQ ID NO: 2615 - protein, 11 aa, Artificial Sequence
  Synthesized
AQPKFPSESAQ

SEQ ID NO: 2616 - protein, 11 aa, Artificial Sequence
  Synthesized
AQPKGGNTPAQ

SEQ ID NO: 2617 - protein, 11 aa, Artificial Sequence
  Synthesized
AQPKIQSALAQ

SEQ ID NO: 2618 - protein, 11 aa, Artificial Sequence
  Synthesized
AQPKLPRRFAQ

SEQ ID NO: 2619 - protein, 11 aa, Artificial Sequence
  Synthesized
AQPKQGKPDAQ

SEQ ID NO: 2620 - protein, 11 aa, Artificial Sequence
  Synthesized
AQPKSREFTAQ

SEQ ID NO: 2621 - protein, 11 aa, Artificial Sequence
  Synthesized
AQPKTGILGAQ

SEQ ID NO: 2622 - protein, 11 aa, Artificial Sequence
  Synthesized
AQPLAKNSNAQ

SEQ ID NO: 2623 - protein, 11 aa, Artificial Sequence
  Synthesized
AQPLASNSAAQ

SEQ ID NO: 2624 - protein, 11 aa, Artificial Sequence
  Synthesized
AQPLEQERTAQ

SEQ ID NO: 2625 - protein, 11 aa, Artificial Sequence
  Synthesized
AQPLGRTNAAQ

SEQ ID NO: 2626 - protein, 11 aa, Artificial Sequence
  Synthesized
AQPLLPRKRAQ

SEQ ID NO: 2627 - protein, 11 aa, Artificial Sequence
  Synthesized
AQPLLPRMHAQ

SEQ ID NO: 2628 - protein, 11 aa, Artificial Sequence
  Synthesized
AQPLLPRPPAQ

SEQ ID NO: 2629 - protein, 11 aa, Artificial Sequence
  Synthesized
AQPLLQNPKAQ

SEQ ID NO: 2630 - protein, 11 aa, Artificial Sequence
  Synthesized
AQPLPDAVRAQ

SEQ ID NO: 2631 - protein, 11 aa, Artificial Sequence
  Synthesized
AQPLPKSHVAQ

SEQ ID NO: 2632 - protein, 11 aa, Artificial Sequence
  Synthesized
AQPLSLRVAAQ

SEQ ID NO: 2633 - protein, 11 aa, Artificial Sequence
  Synthesized
AQPLSRTPSAQ

SEQ ID NO: 2634 - protein, 11 aa, Artificial Sequence
  Synthesized
AQPLTGRNEAQ

SEQ ID NO: 2635 - protein, 11 aa, Artificial Sequence
  Synthesized
AQPLTSPPSAQ

SEQ ID NO: 2636 - protein, 11 aa, Artificial Sequence
  Synthesized
AQPMALSAMAQ

SEQ ID NO: 2637 - protein, 11 aa, Artificial Sequence
  Synthesized
AQPMNRTSMAQ

SEQ ID NO: 2638 - protein, 11 aa, Artificial Sequence
  Synthesized
AQPMRNDWPAQ

SEQ ID NO: 2639 - protein, 11 aa, Artificial Sequence
  Synthesized
AQPMSGKELAQ

SEQ ID NO: 2640 - protein, 11 aa, Artificial Sequence
  Synthesized
AQPMTNPMHAQ

SEQ ID NO: 2641 - protein, 11 aa, Artificial Sequence
  Synthesized
AQPNATRALAQ

SEQ ID NO: 2642 - protein, 11 aa, Artificial Sequence
  Synthesized
AQPNFTRERAQ

SEQ ID NO: 2643 - protein, 11 aa, Artificial Sequence
  Synthesized
AQPNGTRFHAQ

SEQ ID NO: 2644 - protein, 11 aa, Artificial Sequence
  Synthesized
AQPNGTRHYAQ

SEQ ID NO: 2645 - protein, 11 aa, Artificial Sequence
  Synthesized
AQPNGTRRMAQ

SEQ ID NO: 2646 - protein, 11 aa, Artificial Sequence
  Synthesized
AQPNHTRFHAQ

SEQ ID NO: 2647 - protein, 11 aa, Artificial Sequence
  Synthesized
AQPNHTRHPAQ

SEQ ID NO: 2648 - protein, 11 aa, Artificial Sequence
  Synthesized
AQPNHTRRPAQ

SEQ ID NO: 2649 - protein, 11 aa, Artificial Sequence
  Synthesized
AQPNITRNNAQ

SEQ ID NO: 2650 - protein, 11 aa, Artificial Sequence
  Synthesized
AQPNKTRVPAQ

SEQ ID NO: 2651 - protein, 11 aa, Artificial Sequence
  Synthesized
AQPNLDDNPAQ

SEQ ID NO: 2652 - protein, 11 aa, Artificial Sequence
  Synthesized
AQPNLLRHDAQ

SEQ ID NO: 2653 - protein, 11 aa, Artificial Sequence
  Synthesized
AQPNLTRDGAQ

SEQ ID NO: 2654 - protein, 11 aa, Artificial Sequence
  Synthesized
AQPNLTRKFAQ

SEQ ID NO: 2655 - protein, 11 aa, Artificial Sequence
  Synthesized
AQPNMTRPFAQ

SEQ ID NO: 2656 - protein, 11 aa, Artificial Sequence
  Synthesized
AQPNMTRRDAQ

SEQ ID NO: 2657 - protein, 11 aa, Artificial Sequence
  Synthesized
AQPNMTRYSAQ

SEQ ID NO: 2658 - protein, 11 aa, Artificial Sequence
  Synthesized
AQPNNHNKQAQ

SEQ ID NO: 2659 - protein, 11 aa, Artificial Sequence
  Synthesized
AQPNNPLRIAQ

SEQ ID NO: 2660 - protein, 11 aa, Artificial Sequence
  Synthesized
AQPNNTEPMAQ

SEQ ID NO: 2661 - protein, 11 aa, Artificial Sequence
  Synthesized
AQPNNTERGAQ

SEQ ID NO: 2662 - protein, 11 aa, Artificial Sequence
  Synthesized
AQPNNTFPLAQ

SEQ ID NO: 2663 - protein, 11 aa, Artificial Sequence
  Synthesized
AQPNNTFRNAQ

SEQ ID NO: 2664 - protein, 11 aa, Artificial Sequence
  Synthesized
AQPNNTHVFAQ

SEQ ID NO: 2665 - protein, 11 aa, Artificial Sequence
  Synthesized
AQPNNTKVMAQ

SEQ ID NO: 2666 - protein, 11 aa, Artificial Sequence
  Synthesized
AQPNNTNAQAQ

SEQ ID NO: 2667 - protein, 11 aa, Artificial Sequence
  Synthesized
AQPNNTPFGAQ

SEQ ID NO: 2668 - protein, 11 aa, Artificial Sequence
  Synthesized
AQPNNTPIKAQ

SEQ ID NO: 2669 - protein, 11 aa, Artificial Sequence
  Synthesized
AQPNNTPPSAQ

SEQ ID NO: 2670 - protein, 11 aa, Artificial Sequence
  Synthesized
AQPNNTPRTAQ

SEQ ID NO: 2671 - protein, 11 aa, Artificial Sequence
  Synthesized
AQPNNTRMNAQ

SEQ ID NO: 2672 - protein, 11 aa, Artificial Sequence
  Synthesized
AQPNNTTGQAQ

SEQ ID NO: 2673 - protein, 11 aa, Artificial Sequence
  Synthesized
AQPNNTYAMAQ

SEQ ID NO: 2674 - protein, 11 aa, Artificial Sequence
  Synthesized
AQPNNTYKKAQ

SEQ ID NO: 2675 - protein, 11 aa, Artificial Sequence
  Synthesized
AQPNPAHDSAQ

SEQ ID NO: 2676 - protein, 11 aa, Artificial Sequence
  Synthesized
AQPNPEHFSAQ

SEQ ID NO: 2677 - protein, 11 aa, Artificial Sequence
  Synthesized
AQPNPFFHSAQ

SEQ ID NO: 2678 - protein, 11 aa, Artificial Sequence
  Synthesized
AQPNPFKGSAQ

SEQ ID NO: 2679 - protein, 11 aa, Artificial Sequence
  Synthesized
AQPNPFLYSAQ

SEQ ID NO: 2680 - protein, 11 aa, Artificial Sequence
  Synthesized
AQPNPGFTSAQ

SEQ ID NO: 2681 - protein, 11 aa, Artificial Sequence
  Synthesized
AQPNPHTLSAQ

SEQ ID NO: 2682 - protein, 11 aa, Artificial Sequence
  Synthesized
AQPNPIRFSAQ

SEQ ID NO: 2683 - protein, 11 aa, Artificial Sequence
  Synthesized
AQPNPKGYSAQ

SEQ ID NO: 2684 - protein, 11 aa, Artificial Sequence
  Synthesized
AQPNPKSYSAQ

SEQ ID NO: 2685 - protein, 11 aa, Artificial Sequence
  Synthesized
AQPNPLGGSAQ

SEQ ID NO: 2686 - protein, 11 aa, Artificial Sequence
  Synthesized
AQPNPPPGSAQ

SEQ ID NO: 2687 - protein, 11 aa, Artificial Sequence
  Synthesized
AQPNPPYGSAQ

SEQ ID NO: 2688 - protein, 11 aa, Artificial Sequence
  Synthesized
AQPNPTRPHAQ

SEQ ID NO: 2689 - protein, 11 aa, Artificial Sequence
  Synthesized
AQPNPTYGSAQ

SEQ ID NO: 2690 - protein, 11 aa, Artificial Sequence
  Synthesized
AQPNPVFRSAQ

SEQ ID NO: 2691 - protein, 11 aa, Artificial Sequence
  Synthesized
AQPNPVGRSAQ

SEQ ID NO: 2692 - protein, 11 aa, Artificial Sequence
  Synthesized
AQPNPVIRSAQ

SEQ ID NO: 2693 - protein, 11 aa, Artificial Sequence
  Synthesized
AQPNPVKRSAQ

SEQ ID NO: 2694 - protein, 11 aa, Artificial Sequence
  Synthesized
AQPNPVNRSAQ

SEQ ID NO: 2695 - protein, 11 aa, Artificial Sequence
  Synthesized
AQPNPYHVSAQ

SEQ ID NO: 2696 - protein, 11 aa, Artificial Sequence
  Synthesized
AQPNQTRNNAQ

SEQ ID NO: 2697 - protein, 11 aa, Artificial Sequence
  Synthesized
AQPNRLAGNAQ

SEQ ID NO: 2698 - protein, 11 aa, Artificial Sequence
  Synthesized
AQPNRTRVTAQ

SEQ ID NO: 2699 - protein, 11 aa, Artificial Sequence
  Synthesized
AQPNSTKSFAQ

SEQ ID NO: 2700 - protein, 11 aa, Artificial Sequence
  Synthesized
AQPNSTRRMAQ

SEQ ID NO: 2701 - protein, 11 aa, Artificial Sequence
  Synthesized
AQPNTTRAHAQ

SEQ ID NO: 2702 - protein, 11 aa, Artificial Sequence
  Synthesized
AQPNTTRGHAQ

SEQ ID NO: 2703 - protein, 11 aa, Artificial Sequence
  Synthesized
AQPNTTRSTAQ

SEQ ID NO: 2704 - protein, 11 aa, Artificial Sequence
  Synthesized
AQPNVMSAMAQ

SEQ ID NO: 2705 - protein, 11 aa, Artificial Sequence
  Synthesized
AQPNVTRGFAQ

SEQ ID NO: 2706 - protein, 11 aa, Artificial Sequence
  Synthesized
AQPNVTRHLAQ

SEQ ID NO: 2707 - protein, 11 aa, Artificial Sequence
  Synthesized
AQPNVTRHSAQ

SEQ ID NO: 2708 - protein, 11 aa, Artificial Sequence
  Synthesized
AQPNVTRRGAQ

SEQ ID NO: 2709 - protein, 11 aa, Artificial Sequence
  Synthesized
AQPNYTRSHAQ

SEQ ID NO: 2710 - protein, 11 aa, Artificial Sequence
  Synthesized
AQPNYTRSIAQ

SEQ ID NO: 2711 - protein, 11 aa, Artificial Sequence
  Synthesized
AQPPDISAMAQ

SEQ ID NO: 2712 - protein, 11 aa, Artificial Sequence
  Synthesized
AQPPHFSAMAQ

SEQ ID NO: 2713 - protein, 11 aa, Artificial Sequence
  Synthesized
AQPPLMTQDAQ

SEQ ID NO: 2714 - protein, 11 aa, Artificial Sequence
  Synthesized
AQPPLPIPPAQ

SEQ ID NO: 2715 - protein, 11 aa, Artificial Sequence
  Synthesized
AQPPLPIVNAQ

SEQ ID NO: 2716 - protein, 11 aa, Artificial Sequence
  Synthesized
AQPPLPMEGAQ

SEQ ID NO: 2717 - protein, 11 aa, Artificial Sequence
  Synthesized
AQPPLPMHVAQ

SEQ ID NO: 2718 - protein, 11 aa, Artificial Sequence
  Synthesized
AQPPLPRVPAQ

SEQ ID NO: 2719 - protein, 11 aa, Artificial Sequence
  Synthesized
AQPPTVVTRAQ

SEQ ID NO: 2720 - protein, 11 aa, Artificial Sequence
  Synthesized
AQPPVGSAMAQ

SEQ ID NO: 2721 - protein, 11 aa, Artificial Sequence
  Synthesized
AQPPYFSAMAQ

SEQ ID NO: 2722 - protein, 11 aa, Artificial Sequence
  Synthesized
AQPPYKSFMAQ

SEQ ID NO: 2723 - protein, 11 aa, Artificial Sequence
  Synthesized
AQPQANIGVAQ

SEQ ID NO: 2724 - protein, 11 aa, Artificial Sequence
  Synthesized
AQPQLPMFVAQ

SEQ ID NO: 2725 - protein, 11 aa, Artificial Sequence
  Synthesized
AQPQPNNQKAQ

SEQ ID NO: 2726 - protein, 11 aa, Artificial Sequence
  Synthesized
AQPQSKNFSAQ

SEQ ID NO: 2727 - protein, 11 aa, Artificial Sequence
  Synthesized
AQPQTRVDRAQ

SEQ ID NO: 2728 - protein, 11 aa, Artificial Sequence
  Synthesized
AQPRANVTSAQ

SEQ ID NO: 2729 - protein, 11 aa, Artificial Sequence
  Synthesized
AQPRASQSSAQ

SEQ ID NO: 2730 - protein, 11 aa, Artificial Sequence
  Synthesized
AQPREKMSIAQ

SEQ ID NO: 2731 - protein, 11 aa, Artificial Sequence
  Synthesized
AQPRERTYIAQ

SEQ ID NO: 2732 - protein, 11 aa, Artificial Sequence
  Synthesized
AQPRFHSFMAQ

SEQ ID NO: 2733 - protein, 11 aa, Artificial Sequence
  Synthesized
AQPRLPEFQAQ

SEQ ID NO: 2734 - protein, 11 aa, Artificial Sequence
  Synthesized
AQPRNSETSAQ

SEQ ID NO: 2735 - protein, 11 aa, Artificial Sequence
  Synthesized
AQPRPTAAPAQ

SEQ ID NO: 2736 - protein, 11 aa, Artificial Sequence
  Synthesized
AQPRRKSAMAQ

SEQ ID NO: 2737 - protein, 11 aa, Artificial Sequence
  Synthesized
AQPRRLSAMAQ

SEQ ID NO: 2738 - protein, 11 aa, Artificial Sequence
  Synthesized
AQPRSKSFMAQ

SEQ ID NO: 2739 - protein, 11 aa, Artificial Sequence
  Synthesized
AQPSAQTLKAQ

SEQ ID NO: 2740 - protein, 11 aa, Artificial Sequence
  Synthesized
AQPSARSLGAQ

SEQ ID NO: 2741 - protein, 11 aa, Artificial Sequence
  Synthesized
AQPSDSHRPAQ

SEQ ID NO: 2742 - protein, 11 aa, Artificial Sequence
  Synthesized
AQPSFKSFMAQ

SEQ ID NO: 2743 - protein, 11 aa, Artificial Sequence
  Synthesized
AQPSGGSFMAQ

SEQ ID NO: 2744 - protein, 11 aa, Artificial Sequence
  Synthesized
AQPSKDNRIAQ

SEQ ID NO: 2745 - protein, 11 aa, Artificial Sequence
  Synthesized
AQPSLPRFHAQ

SEQ ID NO: 2746 - protein, 11 aa, Artificial Sequence
  Synthesized
AQPSLPRPYAQ

SEQ ID NO: 2747 - protein, 11 aa, Artificial Sequence
  Synthesized
AQPSLPSITAQ

SEQ ID NO: 2748 - protein, 11 aa, Artificial Sequence
  Synthesized
AQPSPAPHAAQ

SEQ ID NO: 2749 - protein, 11 aa, Artificial Sequence
  Synthesized
AQPSPQTKLAQ

SEQ ID NO: 2750 - protein, 11 aa, Artificial Sequence
  Synthesized
AQPSRAPHVAQ

SEQ ID NO: 2751 - protein, 11 aa, Artificial Sequence
  Synthesized
AQPSRDWAAAQ

SEQ ID NO: 2752 - protein, 11 aa, Artificial Sequence
  Synthesized
AQPSRGQTTAQ

SEQ ID NO: 2753 - protein, 11 aa, Artificial Sequence
  Synthesized
AQPSRQDPHAQ

SEQ ID NO: 2754 - protein, 11 aa, Artificial Sequence
  Synthesized
AQPSRTVGTAQ

SEQ ID NO: 2755 - protein, 11 aa, Artificial Sequence
  Synthesized
AQPSSHSYGAQ

SEQ ID NO: 2756 - protein, 11 aa, Artificial Sequence
  Synthesized
AQPSSSIRNAQ

SEQ ID NO: 2757 - protein, 11 aa, Artificial Sequence
  Synthesized
AQPSTTGKTAQ

SEQ ID NO: 2758 - protein, 11 aa, Artificial Sequence
  Synthesized
AQPSVNTTKAQ

SEQ ID NO: 2759 - protein, 11 aa, Artificial Sequence
  Synthesized
AQPSVSTPRAQ

SEQ ID NO: 2760 - protein, 11 aa, Artificial Sequence
  Synthesized
AQPTAKSSMAQ

SEQ ID NO: 2761 - protein, 11 aa, Artificial Sequence
  Synthesized
AQPTDQSRYAQ

SEQ ID NO: 2762 - protein, 11 aa, Artificial Sequence
  Synthesized
AQPTDRVNFAQ

SEQ ID NO: 2763 - protein, 11 aa, Artificial Sequence
  Synthesized
AQPTGHPRSAQ

SEQ ID NO: 2764 - protein, 11 aa, Artificial Sequence
  Synthesized
AQPTIKSSMAQ

SEQ ID NO: 2765 - protein, 11 aa, Artificial Sequence
  Synthesized
AQPTIPRAGAQ

SEQ ID NO: 2766 - protein, 11 aa, Artificial Sequence
  Synthesized
AQPTISQVPAQ

SEQ ID NO: 2767 - protein, 11 aa, Artificial Sequence
  Synthesized
AQPTKITNSAQ

SEQ ID NO: 2768 - protein, 11 aa, Artificial Sequence
  Synthesized
AQPTKSTTSAQ

SEQ ID NO: 2769 - protein, 11 aa, Artificial Sequence
  Synthesized
AQPTLPNIRAQ

SEQ ID NO: 2770 - protein, 11 aa, Artificial Sequence
  Synthesized
AQPTLQVPSAQ

SEQ ID NO: 2771 - protein, 11 aa, Artificial Sequence
  Synthesized
AQPTPYSFMAQ

SEQ ID NO: 2772 - protein, 11 aa, Artificial Sequence
  Synthesized
AQPTRQLTDAQ

SEQ ID NO: 2773 - protein, 11 aa, Artificial Sequence
  Synthesized
AQPTRQSFMAQ

SEQ ID NO: 2774 - protein, 11 aa, Artificial Sequence
  Synthesized
AQPTSKMALAQ

SEQ ID NO: 2775 - protein, 11 aa, Artificial Sequence
  Synthesized
AQPTVTNTKAQ

SEQ ID NO: 2776 - protein, 11 aa, Artificial Sequence
  Synthesized
AQPVAATTSAQ

SEQ ID NO: 2777 - protein, 11 aa, Artificial Sequence
  Synthesized
AQPVGLVKSAQ

SEQ ID NO: 2778 - protein, 11 aa, Artificial Sequence
  Synthesized
AQPVGRSSNAQ

SEQ ID NO: 2779 - protein, 11 aa, Artificial Sequence
  Synthesized
AQPVHTKMIAQ

SEQ ID NO: 2780 - protein, 11 aa, Artificial Sequence
  Synthesized
AQPVKGNDAAQ

SEQ ID NO: 2781 - protein, 11 aa, Artificial Sequence
  Synthesized
AQPVLPQPGAQ

SEQ ID NO: 2782 - protein, 11 aa, Artificial Sequence
  Synthesized
AQPVNNKLQAQ

SEQ ID NO: 2783 - protein, 11 aa, Artificial Sequence
  Synthesized
AQPVSKISVAQ

SEQ ID NO: 2784 - protein, 11 aa, Artificial Sequence
  Synthesized
AQPVSKQSYAQ

SEQ ID NO: 2785 - protein, 11 aa, Artificial Sequence
  Synthesized
AQPVVSGQTAQ

SEQ ID NO: 2786 - protein, 11 aa, Artificial Sequence
  Synthesized
AQPWGKQFLAQ

SEQ ID NO: 2787 - protein, 11 aa, Artificial Sequence
  Synthesized
AQPYLPRGNAQ

SEQ ID NO: 2788 - protein, 11 aa, Artificial Sequence
  Synthesized
AQPYRHSFMAQ

SEQ ID NO: 2789 - protein, 11 aa, Artificial Sequence
  Synthesized
AQPYSNRELAQ

SEQ ID NO: 2790 - protein, 11 aa, Artificial Sequence
  Synthesized
AQQAGRSVAAQ

SEQ ID NO: 2791 - protein, 11 aa, Artificial Sequence
  Synthesized
AQQAGVTVRAQ

SEQ ID NO: 2792 - protein, 11 aa, Artificial Sequence
  Synthesized
AQQARTTNLAQ

SEQ ID NO: 2793 - protein, 11 aa, Artificial Sequence
  Synthesized
AQQAYPEPNAQ

SEQ ID NO: 2794 - protein, 11 aa, Artificial Sequence
  Synthesized
AQQAYTSTSAQ

SEQ ID NO: 2795 - protein, 11 aa, Artificial Sequence
  Synthesized
AQQDLPKPAAQ

SEQ ID NO: 2796 - protein, 11 aa, Artificial Sequence
  Synthesized
AQQDSSAYKAQ

SEQ ID NO: 2797 - protein, 11 aa, Artificial Sequence
  Synthesized
AQQDTSHPKAQ

SEQ ID NO: 2798 - protein, 11 aa, Artificial Sequence
  Synthesized
AQQEQHRHTAQ

SEQ ID NO: 2799 - protein, 11 aa, Artificial Sequence
  Synthesized
AQQETRVHQAQ

SEQ ID NO: 2800 - protein, 11 aa, Artificial Sequence
  Synthesized
AQQEVPSFMAQ

SEQ ID NO: 2801 - protein, 11 aa, Artificial Sequence
  Synthesized
AQQFSSTSAAQ

SEQ ID NO: 2802 - protein, 11 aa, Artificial Sequence
  Synthesized
AQQGASLRVAQ

SEQ ID NO: 2803 - protein, 11 aa, Artificial Sequence
  Synthesized
AQQGHNANSAQ

SEQ ID NO: 2804 - protein, 11 aa, Artificial Sequence
  Synthesized
AQQGKLSSSAQ

SEQ ID NO: 2805 - protein, 11 aa, Artificial Sequence
  Synthesized
AQQGLKAIQAQ

SEQ ID NO: 2806 - protein, 11 aa, Artificial Sequence
  Synthesized
AQQGLPRHTAQ

SEQ ID NO: 2807 - protein, 11 aa, Artificial Sequence
  Synthesized
AQQGLPRKAAQ

SEQ ID NO: 2808 - protein, 11 aa, Artificial Sequence
  Synthesized
AQQGNYAGRAQ

SEQ ID NO: 2809 - protein, 11 aa, Artificial Sequence
  Synthesized
AQQGRSSMTAQ

SEQ ID NO: 2810 - protein, 11 aa, Artificial Sequence
  Synthesized
AQQGSAMTGAQ

SEQ ID NO: 2811 - protein, 11 aa, Artificial Sequence
  Synthesized
AQQGSLQRSAQ

SEQ ID NO: 2812 - protein, 11 aa, Artificial Sequence
  Synthesized
AQQHHLNKSAQ

SEQ ID NO: 2813 - protein, 11 aa, Artificial Sequence
  Synthesized
AQQHLPRYKAQ

SEQ ID NO: 2814 - protein, 11 aa, Artificial Sequence
  Synthesized
AQQHNNIAFAQ

SEQ ID NO: 2815 - protein, 11 aa, Artificial Sequence
  Synthesized
AQQHNRTIPAQ

SEQ ID NO: 2816 - protein, 11 aa, Artificial Sequence
  Synthesized
AQQHSTGTGAQ

SEQ ID NO: 2817 - protein, 11 aa, Artificial Sequence
  Synthesized
AQQHTSPVSAQ

SEQ ID NO: 2818 - protein, 11 aa, Artificial Sequence
  Synthesized
AQQIASRLDAQ

SEQ ID NO: 2819 - protein, 11 aa, Artificial Sequence
  Synthesized
AQQIGRSSNAQ

SEQ ID NO: 2820 - protein, 11 aa, Artificial Sequence
  Synthesized
AQQIHGRDVAQ

SEQ ID NO: 2821 - protein, 11 aa, Artificial Sequence
  Synthesized
AQQIKQTTHAQ

SEQ ID NO: 2822 - protein, 11 aa, Artificial Sequence
  Synthesized
AQQILDDNPAQ

SEQ ID NO: 2823 - protein, 11 aa, Artificial Sequence
  Synthesized
AQQILSASPAQ

SEQ ID NO: 2824 - protein, 11 aa, Artificial Sequence
  Synthesized
AQQISGAMKAQ

SEQ ID NO: 2825 - protein, 11 aa, Artificial Sequence
  Synthesized
AQQISKVGPAQ

SEQ ID NO: 2826 - protein, 11 aa, Artificial Sequence
  Synthesized
AQQKDNSMTAQ

SEQ ID NO: 2827 - protein, 11 aa, Artificial Sequence
  Synthesized
AQQKHPSFMAQ

SEQ ID NO: 2828 - protein, 11 aa, Artificial Sequence
  Synthesized
AQQKLDSAIAQ

SEQ ID NO: 2829 - protein, 11 aa, Artificial Sequence
  Synthesized
AQQKLPKELAQ

SEQ ID NO: 2830 - protein, 11 aa, Artificial Sequence
  Synthesized
AQQKLTTNPAQ

SEQ ID NO: 2831 - protein, 11 aa, Artificial Sequence
  Synthesized
AQQKMTSTTAQ

SEQ ID NO: 2832 - protein, 11 aa, Artificial Sequence
  Synthesized
AQQKNLPTFAQ

SEQ ID NO: 2833 - protein, 11 aa, Artificial Sequence
  Synthesized
AQQKNTPSLAQ

SEQ ID NO: 2834 - protein, 11 aa, Artificial Sequence
  Synthesized
AQQKPSTMVAQ

SEQ ID NO: 2835 - protein, 11 aa, Artificial Sequence
  Synthesized
AQQKQAMIPAQ

SEQ ID NO: 2836 - protein, 11 aa, Artificial Sequence
  Synthesized
AQQKSASVMAQ

SEQ ID NO: 2837 - protein, 11 aa, Artificial Sequence
  Synthesized
AQQKTQTVVAQ

SEQ ID NO: 2838 - protein, 11 aa, Artificial Sequence
  Synthesized
AQQKTRIMEAQ

SEQ ID NO: 2839 - protein, 11 aa, Artificial Sequence
  Synthesized
AQQLARNSNAQ

SEQ ID NO: 2840 - protein, 11 aa, Artificial Sequence
  Synthesized
AQQLHHSAMAQ

SEQ ID NO: 2841 - protein, 11 aa, Artificial Sequence
  Synthesized
AQQLHKADKAQ

SEQ ID NO: 2842 - protein, 11 aa, Artificial Sequence
  Synthesized
AQQLKAGGQAQ

SEQ ID NO: 2843 - protein, 11 aa, Artificial Sequence
  Synthesized
AQQLKGTGPAQ

SEQ ID NO: 2844 - protein, 11 aa, Artificial Sequence
  Synthesized
AQQLKNYNGAQ

SEQ ID NO: 2845 - protein, 11 aa, Artificial Sequence
  Synthesized
AQQLLPRHFAQ

SEQ ID NO: 2846 - protein, 11 aa, Artificial Sequence
  Synthesized
AQQLLPRTVAQ

SEQ ID NO: 2847 - protein, 11 aa, Artificial Sequence
  Synthesized
AQQLLRDNSAQ

SEQ ID NO: 2848 - protein, 11 aa, Artificial Sequence
  Synthesized
AQQLPRSQTAQ

SEQ ID NO: 2849 - protein, 11 aa, Artificial Sequence
  Synthesized
AQQLPSAMSAQ

SEQ ID NO: 2850 - protein, 11 aa, Artificial Sequence
  Synthesized
AQQLRTPTTAQ

SEQ ID NO: 2851 - protein, 11 aa, Artificial Sequence
  Synthesized
AQQLRTREDAQ

SEQ ID NO: 2852 - protein, 11 aa, Artificial Sequence
  Synthesized
AQQLSGFKAAQ

SEQ ID NO: 2853 - protein, 11 aa, Artificial Sequence
  Synthesized
AQQLTSVPKAQ

SEQ ID NO: 2854 - protein, 11 aa, Artificial Sequence
  Synthesized
AQQLVPNRSAQ

SEQ ID NO: 2855 - protein, 11 aa, Artificial Sequence
  Synthesized
AQQLVQHRDAQ

SEQ ID NO: 2856 - protein, 11 aa, Artificial Sequence
  Synthesized
AQQMGGLSVAQ

SEQ ID NO: 2857 - protein, 11 aa, Artificial Sequence
  Synthesized
AQQMPAYKSAQ

SEQ ID NO: 2858 - protein, 11 aa, Artificial Sequence
  Synthesized
AQQMSAPMAAQ

SEQ ID NO: 2859 - protein, 11 aa, Artificial Sequence
  Synthesized
AQQMSTSRLAQ

SEQ ID NO: 2860 - protein, 11 aa, Artificial Sequence
  Synthesized
AQQNATKMVAQ

SEQ ID NO: 2861 - protein, 11 aa, Artificial Sequence
  Synthesized
AQQNEMLVGAQ

SEQ ID NO: 2862 - protein, 11 aa, Artificial Sequence
  Synthesized
AQQNGLVSNAQ

SEQ ID NO: 2863 - protein, 11 aa, Artificial Sequence
  Synthesized
AQQNGTRGRAQ

SEQ ID NO: 2864 - protein, 11 aa, Artificial Sequence
  Synthesized
AQQNHQSNAAQ

SEQ ID NO: 2865 - protein, 11 aa, Artificial Sequence
  Synthesized
AQQNKTRPFAQ

SEQ ID NO: 2866 - protein, 11 aa, Artificial Sequence
  Synthesized
AQQNMQTANAQ

SEQ ID NO: 2867 - protein, 11 aa, Artificial Sequence
  Synthesized
AQQNNTHMPAQ

SEQ ID NO: 2868 - protein, 11 aa, Artificial Sequence
  Synthesized
AQQNNTPMPAQ

SEQ ID NO: 2869 - protein, 11 aa, Artificial Sequence
  Synthesized
AQQNNTTIPAQ

SEQ ID NO: 2870 - protein, 11 aa, Artificial Sequence
  Synthesized
AQQNPFLPSAQ

SEQ ID NO: 2871 - protein, 11 aa, Artificial Sequence
  Synthesized
AQQNPHYISAQ

SEQ ID NO: 2872 - protein, 11 aa, Artificial Sequence
  Synthesized
AQQNPTRGVAQ

SEQ ID NO: 2873 - protein, 11 aa, Artificial Sequence
  Synthesized
AQQNPVKRSAQ

SEQ ID NO: 2874 - protein, 11 aa, Artificial Sequence
  Synthesized
AQQNPVPRSAQ

SEQ ID NO: 2875 - protein, 11 aa, Artificial Sequence
  Synthesized
AQQNQSEMNAQ

SEQ ID NO: 2876 - protein, 11 aa, Artificial Sequence
  Synthesized
AQQNRTRPGAQ

SEQ ID NO: 2877 - protein, 11 aa, Artificial Sequence
  Synthesized
AQQNRTRQFAQ

SEQ ID NO: 2878 - protein, 11 aa, Artificial Sequence
  Synthesized
AQQNSTRSLAQ

SEQ ID NO: 2879 - protein, 11 aa, Artificial Sequence
  Synthesized
AQQNSVKGYAQ

SEQ ID NO: 2880 - protein, 11 aa, Artificial Sequence
  Synthesized
AQQNTVSRSAQ

SEQ ID NO: 2881 - protein, 11 aa, Artificial Sequence
  Synthesized
AQQNVPTRAAQ

SEQ ID NO: 2882 - protein, 11 aa, Artificial Sequence
  Synthesized
AQQNVRMSSAQ

SEQ ID NO: 2883 - protein, 11 aa, Artificial Sequence
  Synthesized
AQQNYTRGQAQ

SEQ ID NO: 2884 - protein, 11 aa, Artificial Sequence
  Synthesized
AQQNYTRPYAQ

SEQ ID NO: 2885 - protein, 11 aa, Artificial Sequence
  Synthesized
AQQPAFAVKAQ

SEQ ID NO: 2886 - protein, 11 aa, Artificial Sequence
  Synthesized
AQQPGRTILAQ

SEQ ID NO: 2887 - protein, 11 aa, Artificial Sequence
  Synthesized
AQQPLPRFGAQ

SEQ ID NO: 2888 - protein, 11 aa, Artificial Sequence
  Synthesized
AQQPLPRPRAQ

SEQ ID NO: 2889 - protein, 11 aa, Artificial Sequence
  Synthesized
AQQPPKPIQAQ

SEQ ID NO: 2890 - protein, 11 aa, Artificial Sequence
  Synthesized
AQQPSLNATAQ

SEQ ID NO: 2891 - protein, 11 aa, Artificial Sequence
  Synthesized
AQQPSNTPAAQ

SEQ ID NO: 2892 - protein, 11 aa, Artificial Sequence
  Synthesized
AQQQHNSFMAQ

SEQ ID NO: 2893 - protein, 11 aa, Artificial Sequence
  Synthesized
AQQQLPNYPAQ

SEQ ID NO: 2894 - protein, 11 aa, Artificial Sequence
  Synthesized
AQQQPSSLMAQ

SEQ ID NO: 2895 - protein, 11 aa, Artificial Sequence
  Synthesized
AQQRGLDPVAQ

SEQ ID NO: 2896 - protein, 11 aa, Artificial Sequence
  Synthesized
AQQRGNMIPAQ

SEQ ID NO: 2897 - protein, 11 aa, Artificial Sequence
  Synthesized
AQQRGPNLGAQ

SEQ ID NO: 2898 - protein, 11 aa, Artificial Sequence
  Synthesized
AQQRHSIVSAQ

SEQ ID NO: 2899 - protein, 11 aa, Artificial Sequence
  Synthesized
AQQRIERVNAQ

SEQ ID NO: 2900 - protein, 11 aa, Artificial Sequence
  Synthesized
AQQRISDPRAQ

SEQ ID NO: 2901 - protein, 11 aa, Artificial Sequence
  Synthesized
AQQRISMSAAQ

SEQ ID NO: 2902 - protein, 11 aa, Artificial Sequence
  Synthesized
AQQRLPRAAAQ

SEQ ID NO: 2903 - protein, 11 aa, Artificial Sequence
  Synthesized
AQQRLPRHGAQ

SEQ ID NO: 2904 - protein, 11 aa, Artificial Sequence
  Synthesized
AQQRMGTVSAQ

SEQ ID NO: 2905 - protein, 11 aa, Artificial Sequence
  Synthesized
AQQRMSVQDAQ

SEQ ID NO: 2906 - protein, 11 aa, Artificial Sequence
  Synthesized
AQQRNVMADAQ

SEQ ID NO: 2907 - protein, 11 aa, Artificial Sequence
  Synthesized
AQQRQERFTAQ

SEQ ID NO: 2908 - protein, 11 aa, Artificial Sequence
  Synthesized
AQQRSSTQGAQ

SEQ ID NO: 2909 - protein, 11 aa, Artificial Sequence
  Synthesized
AQQRTLTPSAQ

SEQ ID NO: 2910 - protein, 11 aa, Artificial Sequence
  Synthesized
AQQRTSTALAQ

SEQ ID NO: 2911 - protein, 11 aa, Artificial Sequence
  Synthesized
AQQRVGRDTAQ

SEQ ID NO: 2912 - protein, 11 aa, Artificial Sequence
  Synthesized
AQQRVSSQHAQ

SEQ ID NO: 2913 - protein, 11 aa, Artificial Sequence
  Synthesized
AQQRVTTSTAQ

SEQ ID NO: 2914 - protein, 11 aa, Artificial Sequence
  Synthesized
AQQSAGRSSAQ

SEQ ID NO: 2915 - protein, 11 aa, Artificial Sequence
  Synthesized
AQQSKDSLRAQ

SEQ ID NO: 2916 - protein, 11 aa, Artificial Sequence
  Synthesized
AQQSQKTTYAQ

SEQ ID NO: 2917 - protein, 11 aa, Artificial Sequence
  Synthesized
AQQSRLTQNAQ

SEQ ID NO: 2918 - protein, 11 aa, Artificial Sequence
  Synthesized
AQQSSMTLTAQ

SEQ ID NO: 2919 - protein, 11 aa, Artificial Sequence
  Synthesized
AQQSSRTLPAQ

SEQ ID NO: 2920 - protein, 11 aa, Artificial Sequence
  Synthesized
AQQSSSHQKAQ

SEQ ID NO: 2921 - protein, 11 aa, Artificial Sequence
  Synthesized
AQQSTGIRSAQ

SEQ ID NO: 2922 - protein, 11 aa, Artificial Sequence
  Synthesized
AQQSTKPMLAQ

SEQ ID NO: 2923 - protein, 11 aa, Artificial Sequence
  Synthesized
AQQTGERRTAQ

SEQ ID NO: 2924 - protein, 11 aa, Artificial Sequence
  Synthesized
AQQTHAYLGAQ

SEQ ID NO: 2925 - protein, 11 aa, Artificial Sequence
  Synthesized
AQQTIPGVKAQ

SEQ ID NO: 2926 - protein, 11 aa, Artificial Sequence
  Synthesized
AQQTKLPQLAQ

SEQ ID NO: 2927 - protein, 11 aa, Artificial Sequence
  Synthesized
AQQTLQNSRAQ

SEQ ID NO: 2928 - protein, 11 aa, Artificial Sequence
  Synthesized
AQQTLTMRTAQ

SEQ ID NO: 2929 - protein, 11 aa, Artificial Sequence
  Synthesized
AQQTNQRSAAQ

SEQ ID NO: 2930 - protein, 11 aa, Artificial Sequence
  Synthesized
AQQTNVKVQAQ

SEQ ID NO: 2931 - protein, 11 aa, Artificial Sequence
  Synthesized
AQQTRSVPTAQ

SEQ ID NO: 2932 - protein, 11 aa, Artificial Sequence
  Synthesized
AQQTRVAPNAQ

SEQ ID NO: 2933 - protein, 11 aa, Artificial Sequence
  Synthesized
AQQTSGTRYAQ

SEQ ID NO: 2934 - protein, 11 aa, Artificial Sequence
  Synthesized
AQQTSSLPNAQ

SEQ ID NO: 2935 - protein, 11 aa, Artificial Sequence
  Synthesized
AQQTTSSPRAQ

SEQ ID NO: 2936 - protein, 11 aa, Artificial Sequence
  Synthesized
AQQTTVYPIAQ

SEQ ID NO: 2937 - protein, 11 aa, Artificial Sequence
  Synthesized
AQQVHFKLSAQ

SEQ ID NO: 2938 - protein, 11 aa, Artificial Sequence
  Synthesized
AQQVISHDRAQ

SEQ ID NO: 2939 - protein, 11 aa, Artificial Sequence
  Synthesized
AQQVKQQISAQ

SEQ ID NO: 2940 - protein, 11 aa, Artificial Sequence
  Synthesized
AQQVMSGSTAQ

SEQ ID NO: 2941 - protein, 11 aa, Artificial Sequence
  Synthesized
AQQVSSQTRAQ

SEQ ID NO: 2942 - protein, 11 aa, Artificial Sequence
  Synthesized
AQQVSSTARAQ

SEQ ID NO: 2943 - protein, 11 aa, Artificial Sequence
  Synthesized
AQQYKGDLVAQ

SEQ ID NO: 2944 - protein, 11 aa, Artificial Sequence
  Synthesized
AQQYSLKVSAQ

SEQ ID NO: 2945 - protein, 11 aa, Artificial Sequence
  Synthesized
AQQYTRLETAQ

SEQ ID NO: 2946 - protein, 11 aa, Artificial Sequence
  Synthesized
AQRAAASADAQ

SEQ ID NO: 2947 - protein, 11 aa, Artificial Sequence
  Synthesized
AQRAASEITAQ

SEQ ID NO: 2948 - protein, 11 aa, Artificial Sequence
  Synthesized
AQRAASLTTAQ

SEQ ID NO: 2949 - protein, 11 aa, Artificial Sequence
  Synthesized
AQRAATNAGAQ

SEQ ID NO: 2950 - protein, 11 aa, Artificial Sequence
  Synthesized
AQRADRQSSAQ

SEQ ID NO: 2951 - protein, 11 aa, Artificial Sequence
  Synthesized
AQRAEALSSAQ

SEQ ID NO: 2952 - protein, 11 aa, Artificial Sequence
  Synthesized
AQRAEQTSVAQ

SEQ ID NO: 2953 - protein, 11 aa, Artificial Sequence
  Synthesized
AQRAGSSLIAQ

SEQ ID NO: 2954 - protein, 11 aa, Artificial Sequence
  Synthesized
AQRAGTYSGAQ

SEQ ID NO: 2955 - protein, 11 aa, Artificial Sequence
  Synthesized
AQRALPRFPAQ

SEQ ID NO: 2956 - protein, 11 aa, Artificial Sequence
  Synthesized
AQRAMEGQKAQ

SEQ ID NO: 2957 - protein, 11 aa, Artificial Sequence
  Synthesized
AQRANAGLNAQ

SEQ ID NO: 2958 - protein, 11 aa, Artificial Sequence
  Synthesized
AQRANGFDRAQ

SEQ ID NO: 2959 - protein, 11 aa, Artificial Sequence
  Synthesized
AQRAPSIGMAQ

SEQ ID NO: 2960 - protein, 11 aa, Artificial Sequence
  Synthesized
AQRASAMNAAQ

SEQ ID NO: 2961 - protein, 11 aa, Artificial Sequence
  Synthesized
AQRASQVGNAQ

SEQ ID NO: 2962 - protein, 11 aa, Artificial Sequence
  Synthesized
AQRASSIPIAQ

SEQ ID NO: 2963 - protein, 11 aa, Artificial Sequence
  Synthesized
AQRASSPYSAQ

SEQ ID NO: 2964 - protein, 11 aa, Artificial Sequence
  Synthesized
AQRASTMSQAQ

SEQ ID NO: 2965 - protein, 11 aa, Artificial Sequence
  Synthesized
AQRATQPTHAQ

SEQ ID NO: 2966 - protein, 11 aa, Artificial Sequence
  Synthesized
AQRATTTGSAQ

SEQ ID NO: 2967 - protein, 11 aa, Artificial Sequence
  Synthesized
AQRAVNSFMAQ

SEQ ID NO: 2968 - protein, 11 aa, Artificial Sequence
  Synthesized
AQRAVTNTLAQ

SEQ ID NO: 2969 - protein, 11 aa, Artificial Sequence
  Synthesized
AQRDAVTTRAQ

SEQ ID NO: 2970 - protein, 11 aa, Artificial Sequence
  Synthesized
AQRDDTKSRAQ

SEQ ID NO: 2971 - protein, 11 aa, Artificial Sequence
  Synthesized
AQRDFALNTAQ

SEQ ID NO: 2972 - protein, 11 aa, Artificial Sequence
  Synthesized
AQRDGSSTMAQ

SEQ ID NO: 2973 - protein, 11 aa, Artificial Sequence
  Synthesized
AQRDKATISAQ

SEQ ID NO: 2974 - protein, 11 aa, Artificial Sequence
  Synthesized
AQRDQLNTSAQ

SEQ ID NO: 2975 - protein, 11 aa, Artificial Sequence
  Synthesized
AQRDQQSLLAQ

SEQ ID NO: 2976 - protein, 11 aa, Artificial Sequence
  Synthesized
AQRDREVLKAQ

SEQ ID NO: 2977 - protein, 11 aa, Artificial Sequence
  Synthesized
AQRDSSNVKAQ

SEQ ID NO: 2978 - protein, 11 aa, Artificial Sequence
  Synthesized
AQRDTANPRAQ

SEQ ID NO: 2979 - protein, 11 aa, Artificial Sequence
  Synthesized
AQRDTGHKMAQ

SEQ ID NO: 2980 - protein, 11 aa, Artificial Sequence
  Synthesized
AQRDVGRFDAQ

SEQ ID NO: 2981 - protein, 11 aa, Artificial Sequence
  Synthesized
AQREHYTGAAQ

SEQ ID NO: 2982 - protein, 11 aa, Artificial Sequence
  Synthesized
AQREKGSPMAQ

SEQ ID NO: 2983 - protein, 11 aa, Artificial Sequence
  Synthesized
AQRELPRYVAQ

SEQ ID NO: 2984 - protein, 11 aa, Artificial Sequence
  Synthesized
AQRFLPAPFAQ

SEQ ID NO: 2985 - protein, 11 aa, Artificial Sequence
  Synthesized
AQRFPGSGMAQ

SEQ ID NO: 2986 - protein, 11 aa, Artificial Sequence
  Synthesized
AQRFTDLGQAQ

SEQ ID NO: 2987 - protein, 11 aa, Artificial Sequence
  Synthesized
AQRFTSQDQAQ

SEQ ID NO: 2988 - protein, 11 aa, Artificial Sequence
  Synthesized
AQRFVSANNAQ

SEQ ID NO: 2989 - protein, 11 aa, Artificial Sequence
  Synthesized
AQRGAPPANAQ

SEQ ID NO: 2990 - protein, 11 aa, Artificial Sequence
  Synthesized
AQRGAVTAHAQ

SEQ ID NO: 2991 - protein, 11 aa, Artificial Sequence
  Synthesized
AQRGDFHTIAQ

SEQ ID NO: 2992 - protein, 11 aa, Artificial Sequence
  Synthesized
AQRGDHSTLAQ

SEQ ID NO: 2993 - protein, 11 aa, Artificial Sequence
  Synthesized
AQRGDMAVTAQ

SEQ ID NO: 2994 - protein, 11 aa, Artificial Sequence
  Synthesized
AQRGDSSGLAQ

SEQ ID NO: 2995 - protein, 11 aa, Artificial Sequence
  Synthesized
AQRGGSSAMAQ

SEQ ID NO: 2996 - protein, 11 aa, Artificial Sequence
  Synthesized
AQRGHPSFMAQ

SEQ ID NO: 2997 - protein, 11 aa, Artificial Sequence
  Synthesized
AQRGIPVGTAQ

SEQ ID NO: 2998 - protein, 11 aa, Artificial Sequence
  Synthesized
AQRGLAANVAQ

SEQ ID NO: 2999 - protein, 11 aa, Artificial Sequence
  Synthesized
AQRGLPEIPAQ

SEQ ID NO: 3000 - protein, 11 aa, Artificial Sequence
  Synthesized
AQRGLPHGHAQ

SEQ ID NO: 3001 - protein, 11 aa, Artificial Sequence
  Synthesized
AQRGLPHHSAQ

SEQ ID NO: 3002 - protein, 11 aa, Artificial Sequence
  Synthesized
AQRGLPIRRAQ

SEQ ID NO: 3003 - protein, 11 aa, Artificial Sequence
  Synthesized
AQRGLPREQAQ

SEQ ID NO: 3004 - protein, 11 aa, Artificial Sequence
  Synthesized
AQRGLPRNEAQ

SEQ ID NO: 3005 - protein, 11 aa, Artificial Sequence
  Synthesized
AQRGLPRRGAQ

SEQ ID NO: 3006 - protein, 11 aa, Artificial Sequence
  Synthesized
AQRGLPTRIAQ

SEQ ID NO: 3007 - protein, 11 aa, Artificial Sequence
  Synthesized
AQRGMAPPNAQ

SEQ ID NO: 3008 - protein, 11 aa, Artificial Sequence
  Synthesized
AQRGMNPTTAQ

SEQ ID NO: 3009 - protein, 11 aa, Artificial Sequence
  Synthesized
AQRGPFSAMAQ

SEQ ID NO: 3010 - protein, 11 aa, Artificial Sequence
  Synthesized
AQRGPQSFMAQ

SEQ ID NO: 3011 - protein, 11 aa, Artificial Sequence
  Synthesized
AQRGPSMSPAQ

SEQ ID NO: 3012 - protein, 11 aa, Artificial Sequence
  Synthesized
AQRGTLMSSAQ

SEQ ID NO: 3013 - protein, 11 aa, Artificial Sequence
  Synthesized
AQRGTNDMNAQ

SEQ ID NO: 3014 - protein, 11 aa, Artificial Sequence
  Synthesized
AQRGTSLMAAQ

SEQ ID NO: 3015 - protein, 11 aa, Artificial Sequence
  Synthesized
AQRHDVNPVAQ

SEQ ID NO: 3016 - protein, 11 aa, Artificial Sequence
  Synthesized
AQRHGGSFMAQ

SEQ ID NO: 3017 - protein, 11 aa, Artificial Sequence
  Synthesized
AQRHHDPSTAQ

SEQ ID NO: 3018 - protein, 11 aa, Artificial Sequence
  Synthesized
AQRHLPHHNAQ

SEQ ID NO: 3019 - protein, 11 aa, Artificial Sequence
  Synthesized
AQRHLPRFKAQ

SEQ ID NO: 3020 - protein, 11 aa, Artificial Sequence
  Synthesized
AQRHLPYGGAQ

SEQ ID NO: 3021 - protein, 11 aa, Artificial Sequence
  Synthesized
AQRHVNSFMAQ

SEQ ID NO: 3022 - protein, 11 aa, Artificial Sequence
  Synthesized
AQRHVNVNPAQ

SEQ ID NO: 3023 - protein, 11 aa, Artificial Sequence
  Synthesized
AQRIESSNSAQ

SEQ ID NO: 3024 - protein, 11 aa, Artificial Sequence
  Synthesized
AQRIGIDTRAQ

SEQ ID NO: 3025 - protein, 11 aa, Artificial Sequence
  Synthesized
AQRILPRGPAQ

SEQ ID NO: 3026 - protein, 11 aa, Artificial Sequence
  Synthesized
AQRIPGEKIAQ

SEQ ID NO: 3027 - protein, 11 aa, Artificial Sequence
  Synthesized
AQRIPTQMNAQ

SEQ ID NO: 3028 - protein, 11 aa, Artificial Sequence
  Synthesized
AQRIQADRQAQ

SEQ ID NO: 3029 - protein, 11 aa, Artificial Sequence
  Synthesized
AQRISDDGKAQ

SEQ ID NO: 3030 - protein, 11 aa, Artificial Sequence
  Synthesized
AQRISTSHQAQ

SEQ ID NO: 3031 - protein, 11 aa, Artificial Sequence
  Synthesized
AQRITNNLTAQ

SEQ ID NO: 3032 - protein, 11 aa, Artificial Sequence
  Synthesized
AQRITPQGSAQ

SEQ ID NO: 3033 - protein, 11 aa, Artificial Sequence
  Synthesized
AQRIVNSSSAQ

SEQ ID NO: 3034 - protein, 11 aa, Artificial Sequence
  Synthesized
AQRKDVSAFAQ

SEQ ID NO: 3035 - protein, 11 aa, Artificial Sequence
  Synthesized
AQRKELNTLAQ

SEQ ID NO: 3036 - protein, 11 aa, Artificial Sequence
  Synthesized
AQRKTTDILAQ

SEQ ID NO: 3037 - protein, 11 aa, Artificial Sequence
  Synthesized
AQRLASQNSAQ

SEQ ID NO: 3038 - protein, 11 aa, Artificial Sequence
  Synthesized
AQRLDTHGNAQ

SEQ ID NO: 3039 - protein, 11 aa, Artificial Sequence
  Synthesized
AQRLENNPLAQ

SEQ ID NO: 3040 - protein, 11 aa, Artificial Sequence
  Synthesized
AQRLEPNISAQ

SEQ ID NO: 3041 - protein, 11 aa, Artificial Sequence
  Synthesized
AQRLGMANTAQ

SEQ ID NO: 3042 - protein, 11 aa, Artificial Sequence
  Synthesized
AQRLGNDATAQ

SEQ ID NO: 3043 - protein, 11 aa, Artificial Sequence
  Synthesized
AQRLHGSFMAQ

SEQ ID NO: 3044 - protein, 11 aa, Artificial Sequence
  Synthesized
AQRLHVEEKAQ

SEQ ID NO: 3045 - protein, 11 aa, Artificial Sequence
  Synthesized
AQRLLAHDLAQ

SEQ ID NO: 3046 - protein, 11 aa, Artificial Sequence
  Synthesized
AQRLLKDTVAQ

SEQ ID NO: 3047 - protein, 11 aa, Artificial Sequence
  Synthesized
AQRLNPSNAAQ

SEQ ID NO: 3048 - protein, 11 aa, Artificial Sequence
  Synthesized
AQRLPQSDIAQ

SEQ ID NO: 3049 - protein, 11 aa, Artificial Sequence
  Synthesized
AQRLPSAVNAQ

SEQ ID NO: 3050 - protein, 11 aa, Artificial Sequence
  Synthesized
AQRLQDSQTAQ

SEQ ID NO: 3051 - protein, 11 aa, Artificial Sequence
  Synthesized
AQRLSAGDAAQ

SEQ ID NO: 3052 - protein, 11 aa, Artificial Sequence
  Synthesized
AQRLSIGNDAQ

SEQ ID NO: 3053 - protein, 11 aa, Artificial Sequence
  Synthesized
AQRLSLPTMAQ

SEQ ID NO: 3054 - protein, 11 aa, Artificial Sequence
  Synthesized
AQRLSSTNVAQ

SEQ ID NO: 3055 - protein, 11 aa, Artificial Sequence
  Synthesized
AQRLSTASEAQ

SEQ ID NO: 3056 - protein, 11 aa, Artificial Sequence
  Synthesized
AQRLSTRDPAQ

SEQ ID NO: 3057 - protein, 11 aa, Artificial Sequence
  Synthesized
AQRLSTSQGAQ

SEQ ID NO: 3058 - protein, 11 aa, Artificial Sequence
  Synthesized
AQRLTISSAAQ

SEQ ID NO: 3059 - protein, 11 aa, Artificial Sequence
  Synthesized
AQRLTSHDSAQ

SEQ ID NO: 3060 - protein, 11 aa, Artificial Sequence
  Synthesized
AQRMATNSSAQ

SEQ ID NO: 3061 - protein, 11 aa, Artificial Sequence
  Synthesized
AQRMDLISNAQ

SEQ ID NO: 3062 - protein, 11 aa, Artificial Sequence
  Synthesized
AQRMETSSSAQ

SEQ ID NO: 3063 - protein, 11 aa, Artificial Sequence
  Synthesized
AQRMFPSAMAQ

SEQ ID NO: 3064 - protein, 11 aa, Artificial Sequence
  Synthesized
AQRMKHSFMAQ

SEQ ID NO: 3065 - protein, 11 aa, Artificial Sequence
  Synthesized
AQRMLPQIGAQ

SEQ ID NO: 3066 - protein, 11 aa, Artificial Sequence
  Synthesized
AQRMLPRLSAQ

SEQ ID NO: 3067 - protein, 11 aa, Artificial Sequence
  Synthesized
AQRMPSTLAAQ

SEQ ID NO: 3068 - protein, 11 aa, Artificial Sequence
  Synthesized
AQRMPTAHSAQ

SEQ ID NO: 3069 - protein, 11 aa, Artificial Sequence
  Synthesized
AQRMSSASVAQ

SEQ ID NO: 3070 - protein, 11 aa, Artificial Sequence
  Synthesized
AQRMSSSSDAQ

SEQ ID NO: 3071 - protein, 11 aa, Artificial Sequence
  Synthesized
AQRMSVASSAQ

SEQ ID NO: 3072 - protein, 11 aa, Artificial Sequence
  Synthesized
AQRMTSQHDAQ

SEQ ID NO: 3073 - protein, 11 aa, Artificial Sequence
  Synthesized
AQRMVNASTAQ

SEQ ID NO: 3074 - protein, 11 aa, Artificial Sequence
  Synthesized
AQRNAINETAQ

SEQ ID NO: 3075 - protein, 11 aa, Artificial Sequence
  Synthesized
AQRNASLNTAQ

SEQ ID NO: 3076 - protein, 11 aa, Artificial Sequence
  Synthesized
AQRNATRTLAQ

SEQ ID NO: 3077 - protein, 11 aa, Artificial Sequence
  Synthesized
AQRNFKDGSAQ

SEQ ID NO: 3078 - protein, 11 aa, Artificial Sequence
  Synthesized
AQRNFTRGYAQ

SEQ ID NO: 3079 - protein, 11 aa, Artificial Sequence
  Synthesized
AQRNFTRQGAQ

SEQ ID NO: 3080 - protein, 11 aa, Artificial Sequence
  Synthesized
AQRNFTRYGAQ

SEQ ID NO: 3081 - protein, 11 aa, Artificial Sequence
  Synthesized
AQRNGDSAMAQ

SEQ ID NO: 3082 - protein, 11 aa, Artificial Sequence
  Synthesized
AQRNGSPELAQ

SEQ ID NO: 3083 - protein, 11 aa, Artificial Sequence
  Synthesized
AQRNGTRATAQ

SEQ ID NO: 3084 - protein, 11 aa, Artificial Sequence
  Synthesized
AQRNGTRHKAQ

SEQ ID NO: 3085 - protein, 11 aa, Artificial Sequence
  Synthesized
AQRNGTRNHAQ

SEQ ID NO: 3086 - protein, 11 aa, Artificial Sequence
  Synthesized
AQRNHAQSVAQ

SEQ ID NO: 3087 - protein, 11 aa, Artificial Sequence
  Synthesized
AQRNHGSAMAQ

SEQ ID NO: 3088 - protein, 11 aa, Artificial Sequence
  Synthesized
AQRNHTRAKAQ

SEQ ID NO: 3089 - protein, 11 aa, Artificial Sequence
  Synthesized
AQRNHTRGNAQ

SEQ ID NO: 3090 - protein, 11 aa, Artificial Sequence
  Synthesized
AQRNISLSSAQ

SEQ ID NO: 3091 - protein, 11 aa, Artificial Sequence
  Synthesized
AQRNITRASAQ

SEQ ID NO: 3092 - protein, 11 aa, Artificial Sequence
  Synthesized
AQRNITRMVAQ

SEQ ID NO: 3093 - protein, 11 aa, Artificial Sequence
  Synthesized
AQRNKTRARAQ

SEQ ID NO: 3094 - protein, 11 aa, Artificial Sequence
  Synthesized
AQRNLESVSAQ

SEQ ID NO: 3095 - protein, 11 aa, Artificial Sequence
  Synthesized
AQRNLGNTTAQ

SEQ ID NO: 3096 - protein, 11 aa, Artificial Sequence
  Synthesized
AQRNLGSAMAQ

SEQ ID NO: 3097 - protein, 11 aa, Artificial Sequence
  Synthesized
AQRNLISNQAQ

SEQ ID NO: 3098 - protein, 11 aa, Artificial Sequence
  Synthesized
AQRNLPKMGAQ

SEQ ID NO: 3099 - protein, 11 aa, Artificial Sequence
  Synthesized
AQRNMPTVQAQ

SEQ ID NO: 3100 - protein, 11 aa, Artificial Sequence
  Synthesized
AQRNNTAFNAQ

SEQ ID NO: 3101 - protein, 11 aa, Artificial Sequence
  Synthesized
AQRNNTAGRAQ

SEQ ID NO: 3102 - protein, 11 aa, Artificial Sequence
  Synthesized
AQRNNTERRAQ

SEQ ID NO: 3103 - protein, 11 aa, Artificial Sequence
  Synthesized
AQRNNTFKPAQ

SEQ ID NO: 3104 - protein, 11 aa, Artificial Sequence
  Synthesized
AQRNNTGISAQ

SEQ ID NO: 3105 - protein, 11 aa, Artificial Sequence
  Synthesized
AQRNNTGPGAQ

SEQ ID NO: 3106 - protein, 11 aa, Artificial Sequence
  Synthesized
AQRNNTHFKAQ

SEQ ID NO: 3107 - protein, 11 aa, Artificial Sequence
  Synthesized
AQRNNTKFHAQ

SEQ ID NO: 3108 - protein, 11 aa, Artificial Sequence
  Synthesized
AQRNNTLNPAQ

SEQ ID NO: 3109 - protein, 11 aa, Artificial Sequence
  Synthesized
AQRNNTLPFAQ

SEQ ID NO: 3110 - protein, 11 aa, Artificial Sequence
  Synthesized
AQRNNTPFRAQ

SEQ ID NO: 3111 - protein, 11 aa, Artificial Sequence
  Synthesized
AQRNNTPKAAQ

SEQ ID NO: 3112 - protein, 11 aa, Artificial Sequence
  Synthesized
AQRNNTPPLAQ

SEQ ID NO: 3113 - protein, 11 aa, Artificial Sequence
  Synthesized
AQRNNTRIMAQ

SEQ ID NO: 3114 - protein, 11 aa, Artificial Sequence
  Synthesized
AQRNNTRPFAQ

SEQ ID NO: 3115 - protein, 11 aa, Artificial Sequence
  Synthesized
AQRNNTRPGAQ

SEQ ID NO: 3116 - protein, 11 aa, Artificial Sequence
  Synthesized
AQRNPAMTTAQ

SEQ ID NO: 3117 - protein, 11 aa, Artificial Sequence
  Synthesized
AQRNPGDISAQ

SEQ ID NO: 3118 - protein, 11 aa, Artificial Sequence
  Synthesized
AQRNPKRNSAQ

SEQ ID NO: 3119 - protein, 11 aa, Artificial Sequence
  Synthesized
AQRNPPMSGAQ

SEQ ID NO: 3120 - protein, 11 aa, Artificial Sequence
  Synthesized
AQRNPPSFMAQ

SEQ ID NO: 3121 - protein, 11 aa, Artificial Sequence
  Synthesized
AQRNPQVFSAQ

SEQ ID NO: 3122 - protein, 11 aa, Artificial Sequence
  Synthesized
AQRNPQVKSAQ

SEQ ID NO: 3123 - protein, 11 aa, Artificial Sequence
  Synthesized
AQRNPSVGSAQ

SEQ ID NO: 3124 - protein, 11 aa, Artificial Sequence
  Synthesized
AQRNPTGRSAQ

SEQ ID NO: 3125 - protein, 11 aa, Artificial Sequence
  Synthesized
AQRNPTRGGAQ

SEQ ID NO: 3126 - protein, 11 aa, Artificial Sequence
  Synthesized
AQRNPVGRSAQ

SEQ ID NO: 3127 - protein, 11 aa, Artificial Sequence
  Synthesized
AQRNPVHRSAQ

SEQ ID NO: 3128 - protein, 11 aa, Artificial Sequence
  Synthesized
AQRNPVQRSAQ

SEQ ID NO: 3129 - protein, 11 aa, Artificial Sequence
  Synthesized
AQRNPVRRSAQ

SEQ ID NO: 3130 - protein, 11 aa, Artificial Sequence
  Synthesized
AQRNPVVRSAQ

SEQ ID NO: 3131 - protein, 11 aa, Artificial Sequence
  Synthesized
AQRNPYEYSAQ

SEQ ID NO: 3132 - protein, 11 aa, Artificial Sequence
  Synthesized
AQRNPYTLSAQ

SEQ ID NO: 3133 - protein, 11 aa, Artificial Sequence
  Synthesized
AQRNQLSTAAQ

SEQ ID NO: 3134 - protein, 11 aa, Artificial Sequence
  Synthesized
AQRNQTIAHAQ

SEQ ID NO: 3135 - protein, 11 aa, Artificial Sequence
  Synthesized
AQRNRTRPHAQ

SEQ ID NO: 3136 - protein, 11 aa, Artificial Sequence
  Synthesized
AQRNSMDYLAQ

SEQ ID NO: 3137 - protein, 11 aa, Artificial Sequence
  Synthesized
AQRNSSPMQAQ

SEQ ID NO: 3138 - protein, 11 aa, Artificial Sequence
  Synthesized
AQRNSVTSMAQ

SEQ ID NO: 3139 - protein, 11 aa, Artificial Sequence
  Synthesized
AQRNTAGLLAQ

SEQ ID NO: 3140 - protein, 11 aa, Artificial Sequence
  Synthesized
AQRNTASSYAQ

SEQ ID NO: 3141 - protein, 11 aa, Artificial Sequence
  Synthesized
AQRNTLQTAAQ

SEQ ID NO: 3142 - protein, 11 aa, Artificial Sequence
  Synthesized
AQRNVDSSKAQ

SEQ ID NO: 3143 - protein, 11 aa, Artificial Sequence
  Synthesized
AQRNVTNVNAQ

SEQ ID NO: 3144 - protein, 11 aa, Artificial Sequence
  Synthesized
AQRNVTRKRAQ

SEQ ID NO: 3145 - protein, 11 aa, Artificial Sequence
  Synthesized
AQRNYTRDHAQ

SEQ ID NO: 3146 - protein, 11 aa, Artificial Sequence
  Synthesized
AQRNYTRPQAQ

SEQ ID NO: 3147 - protein, 11 aa, Artificial Sequence
  Synthesized
AQRNYTRSYAQ

SEQ ID NO: 3148 - protein, 11 aa, Artificial Sequence
  Synthesized
AQRPASSTPAQ

SEQ ID NO: 3149 - protein, 11 aa, Artificial Sequence
  Synthesized
AQRPDLNPIAQ

SEQ ID NO: 3150 - protein, 11 aa, Artificial Sequence
  Synthesized
AQRPDTNRAAQ

SEQ ID NO: 3151 - protein, 11 aa, Artificial Sequence
  Synthesized
AQRPGASMSAQ

SEQ ID NO: 3152 - protein, 11 aa, Artificial Sequence
  Synthesized
AQRPGSTGGAQ

SEQ ID NO: 3153 - protein, 11 aa, Artificial Sequence
  Synthesized
AQRPGVSATAQ

SEQ ID NO: 3154 - protein, 11 aa, Artificial Sequence
  Synthesized
AQRPKHSAMAQ

SEQ ID NO: 3155 - protein, 11 aa, Artificial Sequence
  Synthesized
AQRPKVTDAAQ

SEQ ID NO: 3156 - protein, 11 aa, Artificial Sequence
  Synthesized
AQRPLLDAVAQ

SEQ ID NO: 3157 - protein, 11 aa, Artificial Sequence
  Synthesized
AQRPLPFFKAQ

SEQ ID NO: 3158 - protein, 11 aa, Artificial Sequence
  Synthesized
AQRPLPRGGAQ

SEQ ID NO: 3159 - protein, 11 aa, Artificial Sequence
  Synthesized
AQRPLPRRPAQ

SEQ ID NO: 3160 - protein, 11 aa, Artificial Sequence
  Synthesized
AQRPQSGFGAQ

SEQ ID NO: 3161 - protein, 11 aa, Artificial Sequence
  Synthesized
AQRPRASAMAQ

SEQ ID NO: 3162 - protein, 11 aa, Artificial Sequence
  Synthesized
AQRPSASVAAQ

SEQ ID NO: 3163 - protein, 11 aa, Artificial Sequence
  Synthesized
AQRPSLASQAQ

SEQ ID NO: 3164 - protein, 11 aa, Artificial Sequence
  Synthesized
AQRPTNHLNAQ

SEQ ID NO: 3165 - protein, 11 aa, Artificial Sequence
  Synthesized
AQRPTTSANAQ

SEQ ID NO: 3166 - protein, 11 aa, Artificial Sequence
  Synthesized
AQRPTTTHGAQ

SEQ ID NO: 3167 - protein, 11 aa, Artificial Sequence
  Synthesized
AQRPVGPQVAQ

SEQ ID NO: 3168 - protein, 11 aa, Artificial Sequence
  Synthesized
AQRPVGSAMAQ

SEQ ID NO: 3169 - protein, 11 aa, Artificial Sequence
  Synthesized
AQRQDRESSAQ

SEQ ID NO: 3170 - protein, 11 aa, Artificial Sequence
  Synthesized
AQRQHDHPSAQ

SEQ ID NO: 3171 - protein, 11 aa, Artificial Sequence
  Synthesized
AQRQLPNKVAQ

SEQ ID NO: 3172 - protein, 11 aa, Artificial Sequence
  Synthesized
AQRQMNTGQAQ

SEQ ID NO: 3173 - protein, 11 aa, Artificial Sequence
  Synthesized
AQRQNGHELAQ

SEQ ID NO: 3174 - protein, 11 aa, Artificial Sequence
  Synthesized
AQRQNQTMAAQ

SEQ ID NO: 3175 - protein, 11 aa, Artificial Sequence
  Synthesized
AQRQPHSAMAQ

SEQ ID NO: 3176 - protein, 11 aa, Artificial Sequence
  Synthesized
AQRQPSSYQAQ

SEQ ID NO: 3177 - protein, 11 aa, Artificial Sequence
  Synthesized
AQRQSTQISAQ

SEQ ID NO: 3178 - protein, 11 aa, Artificial Sequence
  Synthesized
AQRQTPAPPAQ

SEQ ID NO: 3179 - protein, 11 aa, Artificial Sequence
  Synthesized
AQRQTQTTSAQ

SEQ ID NO: 3180 - protein, 11 aa, Artificial Sequence
  Synthesized
AQRQTSAQTAQ

SEQ ID NO: 3181 - protein, 11 aa, Artificial Sequence
  Synthesized
AQRQTSLALAQ

SEQ ID NO: 3182 - protein, 11 aa, Artificial Sequence
  Synthesized
AQRRDTGIVAQ

SEQ ID NO: 3183 - protein, 11 aa, Artificial Sequence
  Synthesized
AQRRETVSAAQ

SEQ ID NO: 3184 - protein, 11 aa, Artificial Sequence
  Synthesized
AQRRGELLSAQ

SEQ ID NO: 3185 - protein, 11 aa, Artificial Sequence
  Synthesized
AQRRGHSFMAQ

SEQ ID NO: 3186 - protein, 11 aa, Artificial Sequence
  Synthesized
AQRRVNDTTAQ

SEQ ID NO: 3187 - protein, 11 aa, Artificial Sequence
  Synthesized
AQRSAPDQRAQ

SEQ ID NO: 3188 - protein, 11 aa, Artificial Sequence
  Synthesized
AQRSATSYPAQ

SEQ ID NO: 3189 - protein, 11 aa, Artificial Sequence
  Synthesized
AQRSAVGSSAQ

SEQ ID NO: 3190 - protein, 11 aa, Artificial Sequence
  Synthesized
AQRSDKLMMAQ

SEQ ID NO: 3191 - protein, 11 aa, Artificial Sequence
  Synthesized
AQRSDLSGLAQ

SEQ ID NO: 3192 - protein, 11 aa, Artificial Sequence
  Synthesized
AQRSDPRGTAQ

SEQ ID NO: 3193 - protein, 11 aa, Artificial Sequence
  Synthesized
AQRSDTHSQAQ

SEQ ID NO: 3194 - protein, 11 aa, Artificial Sequence
  Synthesized
AQRSDVRSLAQ

SEQ ID NO: 3195 - protein, 11 aa, Artificial Sequence
  Synthesized
AQRSENPRLAQ

SEQ ID NO: 3196 - protein, 11 aa, Artificial Sequence
  Synthesized
AQRSGFATAAQ

SEQ ID NO: 3197 - protein, 11 aa, Artificial Sequence
  Synthesized
AQRSGLVQNAQ

SEQ ID NO: 3198 - protein, 11 aa, Artificial Sequence
  Synthesized
AQRSGMITAAQ

SEQ ID NO: 3199 - protein, 11 aa, Artificial Sequence
  Synthesized
AQRSGQSMTAQ

SEQ ID NO: 3200 - protein, 11 aa, Artificial Sequence
  Synthesized
AQRSGQSPDAQ

SEQ ID NO: 3201 - protein, 11 aa, Artificial Sequence
  Synthesized
AQRSGSMLPAQ

SEQ ID NO: 3202 - protein, 11 aa, Artificial Sequence
  Synthesized
AQRSGSSGMAQ

SEQ ID NO: 3203 - protein, 11 aa, Artificial Sequence
  Synthesized
AQRSGVYGPAQ

SEQ ID NO: 3204 - protein, 11 aa, Artificial Sequence
  Synthesized
AQRSGYTSDAQ

SEQ ID NO: 3205 - protein, 11 aa, Artificial Sequence
  Synthesized
AQRSLNLHPAQ

SEQ ID NO: 3206 - protein, 11 aa, Artificial Sequence
  Synthesized
AQRSLPRKHAQ

SEQ ID NO: 3207 - protein, 11 aa, Artificial Sequence
  Synthesized
AQRSLPRVKAQ

SEQ ID NO: 3208 - protein, 11 aa, Artificial Sequence
  Synthesized
AQRSNGISLAQ

SEQ ID NO: 3209 - protein, 11 aa, Artificial Sequence
  Synthesized
AQRSNGQAQAQ

SEQ ID NO: 3210 - protein, 11 aa, Artificial Sequence
  Synthesized
AQRSNLQAMAQ

SEQ ID NO: 3211 - protein, 11 aa, Artificial Sequence
  Synthesized
AQRSPGQMPAQ

SEQ ID NO: 3212 - protein, 11 aa, Artificial Sequence
  Synthesized
AQRSPNPMNAQ

SEQ ID NO: 3213 - protein, 11 aa, Artificial Sequence
  Synthesized
AQRSQPTLGAQ

SEQ ID NO: 3214 - protein, 11 aa, Artificial Sequence
  Synthesized
AQRSQQLNPAQ

SEQ ID NO: 3215 - protein, 11 aa, Artificial Sequence
  Synthesized
AQRSQSSPQAQ

SEQ ID NO: 3216 - protein, 11 aa, Artificial Sequence
  Synthesized
AQRSQVLASAQ

SEQ ID NO: 3217 - protein, 11 aa, Artificial Sequence
  Synthesized
AQRSSANAMAQ

SEQ ID NO: 3218 - protein, 11 aa, Artificial Sequence
  Synthesized
AQRSSATGTAQ

SEQ ID NO: 3219 - protein, 11 aa, Artificial Sequence
  Synthesized
AQRSSGVSNAQ

SEQ ID NO: 3220 - protein, 11 aa, Artificial Sequence
  Synthesized
AQRSSHPSGAQ

SEQ ID NO: 3221 - protein, 11 aa, Artificial Sequence
  Synthesized
AQRSSLGSNAQ

SEQ ID NO: 3222 - protein, 11 aa, Artificial Sequence
  Synthesized
AQRSSLQNQAQ

SEQ ID NO: 3223 - protein, 11 aa, Artificial Sequence
  Synthesized
AQRSSMQERAQ

SEQ ID NO: 3224 - protein, 11 aa, Artificial Sequence
  Synthesized
AQRSSNSGQAQ

SEQ ID NO: 3225 - protein, 11 aa, Artificial Sequence
  Synthesized
AQRSSQSMGAQ

SEQ ID NO: 3226 - protein, 11 aa, Artificial Sequence
  Synthesized
AQRSSSGMGAQ

SEQ ID NO: 3227 - protein, 11 aa, Artificial Sequence
  Synthesized
AQRSSSSQGAQ

SEQ ID NO: 3228 - protein, 11 aa, Artificial Sequence
  Synthesized
AQRSSTQMAAQ

SEQ ID NO: 3229 - protein, 11 aa, Artificial Sequence
  Synthesized
AQRSSTSVPAQ

SEQ ID NO: 3230 - protein, 11 aa, Artificial Sequence
  Synthesized
AQRSSVARSAQ

SEQ ID NO: 3231 - protein, 11 aa, Artificial Sequence
  Synthesized
AQRSSYWLLAQ

SEQ ID NO: 3232 - protein, 11 aa, Artificial Sequence
  Synthesized
AQRSTEDRKAQ

SEQ ID NO: 3233 - protein, 11 aa, Artificial Sequence
  Synthesized
AQRSTGVTSAQ

SEQ ID NO: 3234 - protein, 11 aa, Artificial Sequence
  Synthesized
AQRSTSMNGAQ

SEQ ID NO: 3235 - protein, 11 aa, Artificial Sequence
  Synthesized
AQRSTSSLLAQ

SEQ ID NO: 3236 - protein, 11 aa, Artificial Sequence
  Synthesized
AQRTGIHASAQ

SEQ ID NO: 3237 - protein, 11 aa, Artificial Sequence
  Synthesized
AQRTLFSAMAQ

SEQ ID NO: 3238 - protein, 11 aa, Artificial Sequence
  Synthesized
AQRTLPETNAQ

SEQ ID NO: 3239 - protein, 11 aa, Artificial Sequence
  Synthesized
AQRTLPGQYAQ

SEQ ID NO: 3240 - protein, 11 aa, Artificial Sequence
  Synthesized
AQRTLPNSNAQ

SEQ ID NO: 3241 - protein, 11 aa, Artificial Sequence
  Synthesized
AQRTNIHTDAQ

SEQ ID NO: 3242 - protein, 11 aa, Artificial Sequence
  Synthesized
AQRTPGMTPAQ

SEQ ID NO: 3243 - protein, 11 aa, Artificial Sequence
  Synthesized
AQRTPMSQTAQ

SEQ ID NO: 3244 - protein, 11 aa, Artificial Sequence
  Synthesized
AQRTQLSLDAQ

SEQ ID NO: 3245 - protein, 11 aa, Artificial Sequence
  Synthesized
AQRTQSSNMAQ

SEQ ID NO: 3246 - protein, 11 aa, Artificial Sequence
  Synthesized
AQRTQSSSFAQ

SEQ ID NO: 3247 - protein, 11 aa, Artificial Sequence
  Synthesized
AQRTRESKDAQ

SEQ ID NO: 3248 - protein, 11 aa, Artificial Sequence
  Synthesized
AQRTSGASGAQ

SEQ ID NO: 3249 - protein, 11 aa, Artificial Sequence
  Synthesized
AQRTSQIQSAQ

SEQ ID NO: 3250 - protein, 11 aa, Artificial Sequence
  Synthesized
AQRTSTMSAAQ

SEQ ID NO: 3251 - protein, 11 aa, Artificial Sequence
  Synthesized
AQRTTNLATAQ

SEQ ID NO: 3252 - protein, 11 aa, Artificial Sequence
  Synthesized
AQRTTTNVPAQ

SEQ ID NO: 3253 - protein, 11 aa, Artificial Sequence
  Synthesized
AQRTVGSDLAQ

SEQ ID NO: 3254 - protein, 11 aa, Artificial Sequence
  Synthesized
AQRTVNSVPAQ

SEQ ID NO: 3255 - protein, 11 aa, Artificial Sequence
  Synthesized
AQRVAASDLAQ

SEQ ID NO: 3256 - protein, 11 aa, Artificial Sequence
  Synthesized
AQRVAHSLPAQ

SEQ ID NO: 3257 - protein, 11 aa, Artificial Sequence
  Synthesized
AQRVASMTPAQ

SEQ ID NO: 3258 - protein, 11 aa, Artificial Sequence
  Synthesized
AQRVDHPPTAQ

SEQ ID NO: 3259 - protein, 11 aa, Artificial Sequence
  Synthesized
AQRVEESSYAQ

SEQ ID NO: 3260 - protein, 11 aa, Artificial Sequence
  Synthesized
AQRVGDAEVAQ

SEQ ID NO: 3261 - protein, 11 aa, Artificial Sequence
  Synthesized
AQRVGPGSSAQ

SEQ ID NO: 3262 - protein, 11 aa, Artificial Sequence
  Synthesized
AQRVGPSPTAQ

SEQ ID NO: 3263 - protein, 11 aa, Artificial Sequence
  Synthesized
AQRVHDTSAAQ

SEQ ID NO: 3264 - protein, 11 aa, Artificial Sequence
  Synthesized
AQRVLQSDMAQ

SEQ ID NO: 3265 - protein, 11 aa, Artificial Sequence
  Synthesized
AQRVMPEKIAQ

SEQ ID NO: 3266 - protein, 11 aa, Artificial Sequence
  Synthesized
AQRVNTPVTAQ

SEQ ID NO: 3267 - protein, 11 aa, Artificial Sequence
  Synthesized
AQRVPQSFMAQ

SEQ ID NO: 3268 - protein, 11 aa, Artificial Sequence
  Synthesized
AQRVQNSNPAQ

SEQ ID NO: 3269 - protein, 11 aa, Artificial Sequence
  Synthesized
AQRVRLGEPAQ

SEQ ID NO: 3270 - protein, 11 aa, Artificial Sequence
  Synthesized
AQRVSNSTVAQ

SEQ ID NO: 3271 - protein, 11 aa, Artificial Sequence
  Synthesized
AQRVSSSAQAQ

SEQ ID NO: 3272 - protein, 11 aa, Artificial Sequence
  Synthesized
AQRVTKDEIAQ

SEQ ID NO: 3273 - protein, 11 aa, Artificial Sequence
  Synthesized
AQRVTKSDTAQ

SEQ ID NO: 3274 - protein, 11 aa, Artificial Sequence
  Synthesized
AQRVTSNLAAQ

SEQ ID NO: 3275 - protein, 11 aa, Artificial Sequence
  Synthesized
AQRVVGEAVAQ

SEQ ID NO: 3276 - protein, 11 aa, Artificial Sequence
  Synthesized
AQRVVNPSSAQ

SEQ ID NO: 3277 - protein, 11 aa, Artificial Sequence
  Synthesized
AQRVVSSLSAQ

SEQ ID NO: 3278 - protein, 11 aa, Artificial Sequence
  Synthesized
AQRYAGSFMAQ

SEQ ID NO: 3279 - protein, 11 aa, Artificial Sequence
  Synthesized
AQRYAHSFMAQ

SEQ ID NO: 3280 - protein, 11 aa, Artificial Sequence
  Synthesized
AQRYLPGASAQ

SEQ ID NO: 3281 - protein, 11 aa, Artificial Sequence
  Synthesized
AQRYLPPFGAQ

SEQ ID NO: 3282 - protein, 11 aa, Artificial Sequence
  Synthesized
AQRYTMSFMAQ

SEQ ID NO: 3283 - protein, 11 aa, Artificial Sequence
  Synthesized
AQSAANHAQAQ

SEQ ID NO: 3284 - protein, 11 aa, Artificial Sequence
  Synthesized
AQSAARTSTAQ

SEQ ID NO: 3285 - protein, 11 aa, Artificial Sequence
  Synthesized
AQSAASRHPAQ

SEQ ID NO: 3286 - protein, 11 aa, Artificial Sequence
  Synthesized
AQSADRHTMAQ

SEQ ID NO: 3287 - protein, 11 aa, Artificial Sequence
  Synthesized
AQSAELRNLAQ

SEQ ID NO: 3288 - protein, 11 aa, Artificial Sequence
  Synthesized
AQSAGIPFRAQ

SEQ ID NO: 3289 - protein, 11 aa, Artificial Sequence
  Synthesized
AQSAGIRHPAQ

SEQ ID NO: 3290 - protein, 11 aa, Artificial Sequence
  Synthesized
AQSAGKSLYAQ

SEQ ID NO: 3291 - protein, 11 aa, Artificial Sequence
  Synthesized
AQSAHQARAAQ

SEQ ID NO: 3292 - protein, 11 aa, Artificial Sequence
  Synthesized
AQSAINRPPAQ

SEQ ID NO: 3293 - protein, 11 aa, Artificial Sequence
  Synthesized
AQSAITSVNAQ

SEQ ID NO: 3294 - protein, 11 aa, Artificial Sequence
  Synthesized
AQSALPRPQAQ

SEQ ID NO: 3295 - protein, 11 aa, Artificial Sequence
  Synthesized
AQSALSVKPAQ

SEQ ID NO: 3296 - protein, 11 aa, Artificial Sequence
  Synthesized
AQSALYQQQAQ

SEQ ID NO: 3297 - protein, 11 aa, Artificial Sequence
  Synthesized
AQSAMGHQSAQ

SEQ ID NO: 3298 - protein, 11 aa, Artificial Sequence
  Synthesized
AQSANNPKMAQ

SEQ ID NO: 3299 - protein, 11 aa, Artificial Sequence
  Synthesized
AQSAPSDMRAQ

SEQ ID NO: 3300 - protein, 11 aa, Artificial Sequence
  Synthesized
AQSAPTTARAQ

SEQ ID NO: 3301 - protein, 11 aa, Artificial Sequence
  Synthesized
AQSARTITSAQ

SEQ ID NO: 3302 - protein, 11 aa, Artificial Sequence
  Synthesized
AQSASGPTNAQ

SEQ ID NO: 3303 - protein, 11 aa, Artificial Sequence
  Synthesized
AQSATRTGIAQ

SEQ ID NO: 3304 - protein, 11 aa, Artificial Sequence
  Synthesized
AQSATTRSLAQ

SEQ ID NO: 3305 - protein, 11 aa, Artificial Sequence
  Synthesized
AQSAVAGRMAQ

SEQ ID NO: 3306 - protein, 11 aa, Artificial Sequence
  Synthesized
AQSAVIRTGAQ

SEQ ID NO: 3307 - protein, 11 aa, Artificial Sequence
  Synthesized
AQSAVKTGQAQ

SEQ ID NO: 3308 - protein, 11 aa, Artificial Sequence
  Synthesized
AQSAVKVAQAQ

SEQ ID NO: 3309 - protein, 11 aa, Artificial Sequence
  Synthesized
AQSAVPPKNAQ

SEQ ID NO: 3310 - protein, 11 aa, Artificial Sequence
  Synthesized
AQSAVRSASAQ

SEQ ID NO: 3311 - protein, 11 aa, Artificial Sequence
  Synthesized
AQSDGMISKAQ

SEQ ID NO: 3312 - protein, 11 aa, Artificial Sequence
  Synthesized
AQSDGRYLSAQ

SEQ ID NO: 3313 - protein, 11 aa, Artificial Sequence
  Synthesized
AQSDHPANTAQ

SEQ ID NO: 3314 - protein, 11 aa, Artificial Sequence
  Synthesized
AQSDKKMNFAQ

SEQ ID NO: 3315 - protein, 11 aa, Artificial Sequence
  Synthesized
AQSDKQYPLAQ

SEQ ID NO: 3316 - protein, 11 aa, Artificial Sequence
  Synthesized
AQSDNHLQSAQ

SEQ ID NO: 3317 - protein, 11 aa, Artificial Sequence
  Synthesized
AQSDNPRRAAQ

SEQ ID NO: 3318 - protein, 11 aa, Artificial Sequence
  Synthesized
AQSDQKSTAAQ

SEQ ID NO: 3319 - protein, 11 aa, Artificial Sequence
  Synthesized
AQSDQRIRSAQ

SEQ ID NO: 3320 - protein, 11 aa, Artificial Sequence
  Synthesized
AQSDRLTINAQ

SEQ ID NO: 3321 - protein, 11 aa, Artificial Sequence
  Synthesized
AQSDRSRAMAQ

SEQ ID NO: 3322 - protein, 11 aa, Artificial Sequence
  Synthesized
AQSDSFHPQAQ

SEQ ID NO: 3323 - protein, 11 aa, Artificial Sequence
  Synthesized
AQSERLTNNAQ

SEQ ID NO: 3324 - protein, 11 aa, Artificial Sequence
  Synthesized
AQSERSVPNAQ

SEQ ID NO: 3325 - protein, 11 aa, Artificial Sequence
  Synthesized
AQSETVQSIAQ

SEQ ID NO: 3326 - protein, 11 aa, Artificial Sequence
  Synthesized
AQSEYNVRTAQ

SEQ ID NO: 3327 - protein, 11 aa, Artificial Sequence
  Synthesized
AQSFASLTAAQ

SEQ ID NO: 3328 - protein, 11 aa, Artificial Sequence
  Synthesized
AQSFGHKTSAQ

SEQ ID NO: 3329 - protein, 11 aa, Artificial Sequence
  Synthesized
AQSFGQNRVAQ

SEQ ID NO: 3330 - protein, 11 aa, Artificial Sequence
  Synthesized
AQSFHSSSSAQ

SEQ ID NO: 3331 - protein, 11 aa, Artificial Sequence
  Synthesized
AQSFLPPHKAQ

SEQ ID NO: 3332 - protein, 11 aa, Artificial Sequence
  Synthesized
AQSFNQQSAAQ

SEQ ID NO: 3333 - protein, 11 aa, Artificial Sequence
  Synthesized
AQSFSALGAAQ

SEQ ID NO: 3334 - protein, 11 aa, Artificial Sequence
  Synthesized
AQSFSSRLQAQ

SEQ ID NO: 3335 - protein, 11 aa, Artificial Sequence
  Synthesized
AQSGANVRNAQ

SEQ ID NO: 3336 - protein, 11 aa, Artificial Sequence
  Synthesized
AQSGAQAMTAQ

SEQ ID NO: 3337 - protein, 11 aa, Artificial Sequence
  Synthesized
AQSGDYSFMAQ

SEQ ID NO: 3338 - protein, 11 aa, Artificial Sequence
  Synthesized
AQSGGGYKLAQ

SEQ ID NO: 3339 - protein, 11 aa, Artificial Sequence
  Synthesized
AQSGGRPMIAQ

SEQ ID NO: 3340 - protein, 11 aa, Artificial Sequence
  Synthesized
AQSGGTKSIAQ

SEQ ID NO: 3341 - protein, 11 aa, Artificial Sequence
  Synthesized
AQSGGTQSKAQ

SEQ ID NO: 3342 - protein, 11 aa, Artificial Sequence
  Synthesized
AQSGIKDMRAQ

SEQ ID NO: 3343 - protein, 11 aa, Artificial Sequence
  Synthesized
AQSGIKMSSAQ

SEQ ID NO: 3344 - protein, 11 aa, Artificial Sequence
  Synthesized
AQSGISGQRAQ

SEQ ID NO: 3345 - protein, 11 aa, Artificial Sequence
  Synthesized
AQSGKALGFAQ

SEQ ID NO: 3346 - protein, 11 aa, Artificial Sequence
  Synthesized
AQSGKTSLLAQ

SEQ ID NO: 3347 - protein, 11 aa, Artificial Sequence
  Synthesized
AQSGLANESAQ

SEQ ID NO: 3348 - protein, 11 aa, Artificial Sequence
  Synthesized
AQSGLGTPRAQ

SEQ ID NO: 3349 - protein, 11 aa, Artificial Sequence
  Synthesized
AQSGLNSLTAQ

SEQ ID NO: 3350 - protein, 11 aa, Artificial Sequence
  Synthesized
AQSGLPFFRAQ

SEQ ID NO: 3351 - protein, 11 aa, Artificial Sequence
  Synthesized
AQSGLPFKHAQ

SEQ ID NO: 3352 - protein, 11 aa, Artificial Sequence
  Synthesized
AQSGLPRTRAQ

SEQ ID NO: 3353 - protein, 11 aa, Artificial Sequence
  Synthesized
AQSGNDLTNAQ

SEQ ID NO: 3354 - protein, 11 aa, Artificial Sequence
  Synthesized
AQSGNGMLTAQ

SEQ ID NO: 3355 - protein, 11 aa, Artificial Sequence
  Synthesized
AQSGNGMRIAQ

SEQ ID NO: 3356 - protein, 11 aa, Artificial Sequence
  Synthesized
AQSGNRSGVAQ

SEQ ID NO: 3357 - protein, 11 aa, Artificial Sequence
  Synthesized
AQSGNSLTKAQ

SEQ ID NO: 3358 - protein, 11 aa, Artificial Sequence
  Synthesized
AQSGNTLIPAQ

SEQ ID NO: 3359 - protein, 11 aa, Artificial Sequence
  Synthesized
AQSGPMNKMAQ

SEQ ID NO: 3360 - protein, 11 aa, Artificial Sequence
  Synthesized
AQSGPQLYKAQ

SEQ ID NO: 3361 - protein, 11 aa, Artificial Sequence
  Synthesized
AQSGQTTRDAQ

SEQ ID NO: 3362 - protein, 11 aa, Artificial Sequence
  Synthesized
AQSGRLDQRAQ

SEQ ID NO: 3363 - protein, 11 aa, Artificial Sequence
  Synthesized
AQSGRMSLDAQ

SEQ ID NO: 3364 - protein, 11 aa, Artificial Sequence
  Synthesized
AQSGRTSLAAQ

SEQ ID NO: 3365 - protein, 11 aa, Artificial Sequence
  Synthesized
AQSGRVHSPAQ

SEQ ID NO: 3366 - protein, 11 aa, Artificial Sequence
  Synthesized
AQSGSGSRTAQ

SEQ ID NO: 3367 - protein, 11 aa, Artificial Sequence
  Synthesized
AQSGSIRHLAQ

SEQ ID NO: 3368 - protein, 11 aa, Artificial Sequence
  Synthesized
AQSGSKPTIAQ

SEQ ID NO: 3369 - protein, 11 aa, Artificial Sequence
  Synthesized
AQSGSLKGLAQ

SEQ ID NO: 3370 - protein, 11 aa, Artificial Sequence
  Synthesized
AQSGSNLTKAQ

SEQ ID NO: 3371 - protein, 11 aa, Artificial Sequence
  Synthesized
AQSGTKSGLAQ

SEQ ID NO: 3372 - protein, 11 aa, Artificial Sequence
  Synthesized
AQSGTMARPAQ

SEQ ID NO: 3373 - protein, 11 aa, Artificial Sequence
  Synthesized
AQSGTMLRDAQ

SEQ ID NO: 3374 - protein, 11 aa, Artificial Sequence
  Synthesized
AQSGTQMNPAQ

SEQ ID NO: 3375 - protein, 11 aa, Artificial Sequence
  Synthesized
AQSGVNLARAQ

SEQ ID NO: 3376 - protein, 11 aa, Artificial Sequence
  Synthesized
AQSGVSQYSAQ

SEQ ID NO: 3377 - protein, 11 aa, Artificial Sequence
  Synthesized
AQSGVSRAEAQ

SEQ ID NO: 3378 - protein, 11 aa, Artificial Sequence
  Synthesized
AQSGYKPTVAQ

SEQ ID NO: 3379 - protein, 11 aa, Artificial Sequence
  Synthesized
AQSHAGHVNAQ

SEQ ID NO: 3380 - protein, 11 aa, Artificial Sequence
  Synthesized
AQSHHVASNAQ

SEQ ID NO: 3381 - protein, 11 aa, Artificial Sequence
  Synthesized
AQSHIDTSRAQ

SEQ ID NO: 3382 - protein, 11 aa, Artificial Sequence
  Synthesized
AQSHNPAVVAQ

SEQ ID NO: 3383 - protein, 11 aa, Artificial Sequence
  Synthesized
AQSHQEIQRAQ

SEQ ID NO: 3384 - protein, 11 aa, Artificial Sequence
  Synthesized
AQSHSPNLKAQ

SEQ ID NO: 3385 - protein, 11 aa, Artificial Sequence
  Synthesized
AQSHSYDKNAQ

SEQ ID NO: 3386 - protein, 11 aa, Artificial Sequence
  Synthesized
AQSHTRSAMAQ

SEQ ID NO: 3387 - protein, 11 aa, Artificial Sequence
  Synthesized
AQSHTVMHGAQ

SEQ ID NO: 3388 - protein, 11 aa, Artificial Sequence
  Synthesized
AQSHVLPHPAQ

SEQ ID NO: 3389 - protein, 11 aa, Artificial Sequence
  Synthesized
AQSHYPNGSAQ

SEQ ID NO: 3390 - protein, 11 aa, Artificial Sequence
  Synthesized
AQSIGNGQAAQ

SEQ ID NO: 3391 - protein, 11 aa, Artificial Sequence
  Synthesized
AQSIGQAKGAQ

SEQ ID NO: 3392 - protein, 11 aa, Artificial Sequence
  Synthesized
AQSIGRNPAAQ

SEQ ID NO: 3393 - protein, 11 aa, Artificial Sequence
  Synthesized
AQSIGRSVTAQ

SEQ ID NO: 3394 - protein, 11 aa, Artificial Sequence
  Synthesized
AQSIMKTQDAQ

SEQ ID NO: 3395 - protein, 11 aa, Artificial Sequence
  Synthesized
AQSINLRNQAQ

SEQ ID NO: 3396 - protein, 11 aa, Artificial Sequence
  Synthesized
AQSIPLTTSAQ

SEQ ID NO: 3397 - protein, 11 aa, Artificial Sequence
  Synthesized
AQSIPSVKIAQ

SEQ ID NO: 3398 - protein, 11 aa, Artificial Sequence
  Synthesized
AQSISALEMAQ

SEQ ID NO: 3399 - protein, 11 aa, Artificial Sequence
  Synthesized
AQSITSSMVAQ

SEQ ID NO: 3400 - protein, 11 aa, Artificial Sequence
  Synthesized
AQSITSTKDAQ

SEQ ID NO: 3401 - protein, 11 aa, Artificial Sequence
  Synthesized
AQSIVLPQNAQ

SEQ ID NO: 3402 - protein, 11 aa, Artificial Sequence
  Synthesized
AQSIVSSMLAQ

SEQ ID NO: 3403 - protein, 11 aa, Artificial Sequence
  Synthesized
AQSIYEIRQAQ

SEQ ID NO: 3404 - protein, 11 aa, Artificial Sequence
  Synthesized
AQSKAFFSEAQ

SEQ ID NO: 3405 - protein, 11 aa, Artificial Sequence
  Synthesized
AQSKDAPLTAQ

SEQ ID NO: 3406 - protein, 11 aa, Artificial Sequence
  Synthesized
AQSKDRLPLAQ

SEQ ID NO: 3407 - protein, 11 aa, Artificial Sequence
  Synthesized
AQSKESTGRAQ

SEQ ID NO: 3408 - protein, 11 aa, Artificial Sequence
  Synthesized
AQSKGGNNTAQ

SEQ ID NO: 3409 - protein, 11 aa, Artificial Sequence
  Synthesized
AQSKGQQLSAQ

SEQ ID NO: 3410 - protein, 11 aa, Artificial Sequence
  Synthesized
AQSKHQTIPAQ

SEQ ID NO: 3411 - protein, 11 aa, Artificial Sequence
  Synthesized
AQSKINTGNAQ

SEQ ID NO: 3412 - protein, 11 aa, Artificial Sequence
  Synthesized
AQSKLEVTLAQ

SEQ ID NO: 3413 - protein, 11 aa, Artificial Sequence
  Synthesized
AQSKLLSSDAQ

SEQ ID NO: 3414 - protein, 11 aa, Artificial Sequence
  Synthesized
AQSKLQAVAAQ

SEQ ID NO: 3415 - protein, 11 aa, Artificial Sequence
  Synthesized
AQSKNLPHVAQ

SEQ ID NO: 3416 - protein, 11 aa, Artificial Sequence
  Synthesized
AQSKQIGLQAQ

SEQ ID NO: 3417 - protein, 11 aa, Artificial Sequence
  Synthesized
AQSKRSSAMAQ

SEQ ID NO: 3418 - protein, 11 aa, Artificial Sequence
  Synthesized
AQSKSRSQDAQ

SEQ ID NO: 3419 - protein, 11 aa, Artificial Sequence
  Synthesized
AQSKSVVPNAQ

SEQ ID NO: 3420 - protein, 11 aa, Artificial Sequence
  Synthesized
AQSKTAGTIAQ

SEQ ID NO: 3421 - protein, 11 aa, Artificial Sequence
  Synthesized
AQSKTSSVVAQ

SEQ ID NO: 3422 - protein, 11 aa, Artificial Sequence
  Synthesized
AQSKVQMPSAQ

SEQ ID NO: 3423 - protein, 11 aa, Artificial Sequence
  Synthesized
AQSKVTSTHAQ

SEQ ID NO: 3424 - protein, 11 aa, Artificial Sequence
  Synthesized
AQSLASSAWAQ

SEQ ID NO: 3425 - protein, 11 aa, Artificial Sequence
  Synthesized
AQSLASTPKAQ

SEQ ID NO: 3426 - protein, 11 aa, Artificial Sequence
  Synthesized
AQSLDPQSKAQ

SEQ ID NO: 3427 - protein, 11 aa, Artificial Sequence
  Synthesized
AQSLDRNRAAQ

SEQ ID NO: 3428 - protein, 11 aa, Artificial Sequence
  Synthesized
AQSLEHPRHAQ

SEQ ID NO: 3429 - protein, 11 aa, Artificial Sequence
  Synthesized
AQSLEVTADAQ

SEQ ID NO: 3430 - protein, 11 aa, Artificial Sequence
  Synthesized
AQSLGLSVNAQ

SEQ ID NO: 3431 - protein, 11 aa, Artificial Sequence
  Synthesized
AQSLGRLDSAQ

SEQ ID NO: 3432 - protein, 11 aa, Artificial Sequence
  Synthesized
AQSLGSRAAAQ

SEQ ID NO: 3433 - protein, 11 aa, Artificial Sequence
  Synthesized
AQSLGSVSQAQ

SEQ ID NO: 3434 - protein, 11 aa, Artificial Sequence
  Synthesized
AQSLHNFPSAQ

SEQ ID NO: 3435 - protein, 11 aa, Artificial Sequence
  Synthesized
AQSLHVSGLAQ

SEQ ID NO: 3436 - protein, 11 aa, Artificial Sequence
  Synthesized
AQSLKLDSQAQ

SEQ ID NO: 3437 - protein, 11 aa, Artificial Sequence
  Synthesized
AQSLKSSRDAQ

SEQ ID NO: 3438 - protein, 11 aa, Artificial Sequence
  Synthesized
AQSLKTMLEAQ

SEQ ID NO: 3439 - protein, 11 aa, Artificial Sequence
  Synthesized
AQSLLDSTKAQ

SEQ ID NO: 3440 - protein, 11 aa, Artificial Sequence
  Synthesized
AQSLLEAPFAQ

SEQ ID NO: 3441 - protein, 11 aa, Artificial Sequence
  Synthesized
AQSLLNSTGAQ

SEQ ID NO: 3442 - protein, 11 aa, Artificial Sequence
  Synthesized
AQSLMNATSAQ

SEQ ID NO: 3443 - protein, 11 aa, Artificial Sequence
  Synthesized
AQSLMTKTGAQ

SEQ ID NO: 3444 - protein, 11 aa, Artificial Sequence
  Synthesized
AQSLNHSPLAQ

SEQ ID NO: 3445 - protein, 11 aa, Artificial Sequence
  Synthesized
AQSLNQSESAQ

SEQ ID NO: 3446 - protein, 11 aa, Artificial Sequence
  Synthesized
AQSLNRTIQAQ

SEQ ID NO: 3447 - protein, 11 aa, Artificial Sequence
  Synthesized
AQSLPALELAQ

SEQ ID NO: 3448 - protein, 11 aa, Artificial Sequence
  Synthesized
AQSLPTSRGAQ

SEQ ID NO: 3449 - protein, 11 aa, Artificial Sequence
  Synthesized
AQSLQLGATAQ

SEQ ID NO: 3450 - protein, 11 aa, Artificial Sequence
  Synthesized
AQSLQRSEDAQ

SEQ ID NO: 3451 - protein, 11 aa, Artificial Sequence
  Synthesized
AQSLQVTRSAQ

SEQ ID NO: 3452 - protein, 11 aa, Artificial Sequence
  Synthesized
AQSLRSSAVAQ

SEQ ID NO: 3453 - protein, 11 aa, Artificial Sequence
  Synthesized
AQSLRTNEAAQ

SEQ ID NO: 3454 - protein, 11 aa, Artificial Sequence
  Synthesized
AQSLRVPASAQ

SEQ ID NO: 3455 - protein, 11 aa, Artificial Sequence
  Synthesized
AQSLSGQGKAQ

SEQ ID NO: 3456 - protein, 11 aa, Artificial Sequence
  Synthesized
AQSLSGSSRAQ

SEQ ID NO: 3457 - protein, 11 aa, Artificial Sequence
  Synthesized
AQSLSKNNSAQ

SEQ ID NO: 3458 - protein, 11 aa, Artificial Sequence
  Synthesized
AQSLSMPRDAQ

SEQ ID NO: 3459 - protein, 11 aa, Artificial Sequence
  Synthesized
AQSLSPKTPAQ

SEQ ID NO: 3460 - protein, 11 aa, Artificial Sequence
  Synthesized
AQSLSRQRDAQ

SEQ ID NO: 3461 - protein, 11 aa, Artificial Sequence
  Synthesized
AQSLSRSATAQ

SEQ ID NO: 3462 - protein, 11 aa, Artificial Sequence
  Synthesized
AQSLSSSRIAQ

SEQ ID NO: 3463 - protein, 11 aa, Artificial Sequence
  Synthesized
AQSLSTHMNAQ

SEQ ID NO: 3464 - protein, 11 aa, Artificial Sequence
  Synthesized
AQSLSTITGAQ

SEQ ID NO: 3465 - protein, 11 aa, Artificial Sequence
  Synthesized
AQSLSYASSAQ

SEQ ID NO: 3466 - protein, 11 aa, Artificial Sequence
  Synthesized
AQSLTDPLRAQ

SEQ ID NO: 3467 - protein, 11 aa, Artificial Sequence
  Synthesized
AQSLTNVKTAQ

SEQ ID NO: 3468 - protein, 11 aa, Artificial Sequence
  Synthesized
AQSLVKAPQAQ

SEQ ID NO: 3469 - protein, 11 aa, Artificial Sequence
  Synthesized
AQSLVRNGTAQ

SEQ ID NO: 3470 - protein, 11 aa, Artificial Sequence
  Synthesized
AQSLVRSDSAQ

SEQ ID NO: 3471 - protein, 11 aa, Artificial Sequence
  Synthesized
AQSMAKESDAQ

SEQ ID NO: 3472 - protein, 11 aa, Artificial Sequence
  Synthesized
AQSMAKISSAQ

SEQ ID NO: 3473 - protein, 11 aa, Artificial Sequence
  Synthesized
AQSMAMGKLAQ

SEQ ID NO: 3474 - protein, 11 aa, Artificial Sequence
  Synthesized
AQSMCSLSQAQ

SEQ ID NO: 3475 - protein, 11 aa, Artificial Sequence
  Synthesized
AQSMGSSSRAQ

SEQ ID NO: 3476 - protein, 11 aa, Artificial Sequence
  Synthesized
AQSMHQTAGAQ

SEQ ID NO: 3477 - protein, 11 aa, Artificial Sequence
  Synthesized
AQSMLESDKAQ

SEQ ID NO: 3478 - protein, 11 aa, Artificial Sequence
  Synthesized
AQSMRGNVVAQ

SEQ ID NO: 3479 - protein, 11 aa, Artificial Sequence
  Synthesized
AQSMSLRDYAQ

SEQ ID NO: 3480 - protein, 11 aa, Artificial Sequence
  Synthesized
AQSMSRGSYAQ

SEQ ID NO: 3481 - protein, 11 aa, Artificial Sequence
  Synthesized
AQSMSRSSVAQ

SEQ ID NO: 3482 - protein, 11 aa, Artificial Sequence
  Synthesized
AQSMSSNLTAQ

SEQ ID NO: 3483 - protein, 11 aa, Artificial Sequence
  Synthesized
AQSMSSPRAAQ

SEQ ID NO: 3484 - protein, 11 aa, Artificial Sequence
  Synthesized
AQSMSSSRAAQ

SEQ ID NO: 3485 - protein, 11 aa, Artificial Sequence
  Synthesized
AQSMSSVHNAQ

SEQ ID NO: 3486 - protein, 11 aa, Artificial Sequence
  Synthesized
AQSMSTRIAAQ

SEQ ID NO: 3487 - protein, 11 aa, Artificial Sequence
  Synthesized
AQSMTRNTVAQ

SEQ ID NO: 3488 - protein, 11 aa, Artificial Sequence
  Synthesized
AQSMTRSVTAQ

SEQ ID NO: 3489 - protein, 11 aa, Artificial Sequence
  Synthesized
AQSMTTSRPAQ

SEQ ID NO: 3490 - protein, 11 aa, Artificial Sequence
  Synthesized
AQSMVGERFAQ

SEQ ID NO: 3491 - protein, 11 aa, Artificial Sequence
  Synthesized
AQSNARSSLAQ

SEQ ID NO: 3492 - protein, 11 aa, Artificial Sequence
  Synthesized
AQSNDTRKRAQ

SEQ ID NO: 3493 - protein, 11 aa, Artificial Sequence
  Synthesized
AQSNFHNTTAQ

SEQ ID NO: 3494 - protein, 11 aa, Artificial Sequence
  Synthesized
AQSNFNRTGAQ

SEQ ID NO: 3495 - protein, 11 aa, Artificial Sequence
  Synthesized
AQSNHNVNTAQ

SEQ ID NO: 3496 - protein, 11 aa, Artificial Sequence
  Synthesized
AQSNIKYSPAQ

SEQ ID NO: 3497 - protein, 11 aa, Artificial Sequence
  Synthesized
AQSNIRNNTAQ

SEQ ID NO: 3498 - protein, 11 aa, Artificial Sequence
  Synthesized
AQSNITRNNAQ

SEQ ID NO: 3499 - protein, 11 aa, Artificial Sequence
  Synthesized
AQSNKLHTSAQ

SEQ ID NO: 3500 - protein, 11 aa, Artificial Sequence
  Synthesized
AQSNKTRIFAQ

SEQ ID NO: 3501 - protein, 11 aa, Artificial Sequence
  Synthesized
AQSNKTRTAAQ

SEQ ID NO: 3502 - protein, 11 aa, Artificial Sequence
  Synthesized
AQSNLNTRGAQ

SEQ ID NO: 3503 - protein, 11 aa, Artificial Sequence
  Synthesized
AQSNLPPPAAQ

SEQ ID NO: 3504 - protein, 11 aa, Artificial Sequence
  Synthesized
AQSNLRLNPAQ

SEQ ID NO: 3505 - protein, 11 aa, Artificial Sequence
  Synthesized
AQSNLTRSNAQ

SEQ ID NO: 3506 - protein, 11 aa, Artificial Sequence
  Synthesized
AQSNMHQLTAQ

SEQ ID NO: 3507 - protein, 11 aa, Artificial Sequence
  Synthesized
AQSNMTRPAAQ

SEQ ID NO: 3508 - protein, 11 aa, Artificial Sequence
  Synthesized
AQSNNTFKPAQ

SEQ ID NO: 3509 - protein, 11 aa, Artificial Sequence
  Synthesized
AQSNNTGEPAQ

SEQ ID NO: 3510 - protein, 11 aa, Artificial Sequence
  Synthesized
AQSNNTIEFAQ

SEQ ID NO: 3511 - protein, 11 aa, Artificial Sequence
  Synthesized
AQSNNTPSFAQ

SEQ ID NO: 3512 - protein, 11 aa, Artificial Sequence
  Synthesized
AQSNNTTRSAQ

SEQ ID NO: 3513 - protein, 11 aa, Artificial Sequence
  Synthesized
AQSNPGPLSAQ

SEQ ID NO: 3514 - protein, 11 aa, Artificial Sequence
  Synthesized
AQSNPLTVSAQ

SEQ ID NO: 3515 - protein, 11 aa, Artificial Sequence
  Synthesized
AQSNPMRTPAQ

SEQ ID NO: 3516 - protein, 11 aa, Artificial Sequence
  Synthesized
AQSNPPYESAQ

SEQ ID NO: 3517 - protein, 11 aa, Artificial Sequence
  Synthesized
AQSNPVFRSAQ

SEQ ID NO: 3518 - protein, 11 aa, Artificial Sequence
  Synthesized
AQSNPVHRSAQ

SEQ ID NO: 3519 - protein, 11 aa, Artificial Sequence
  Synthesized
AQSNPVRSNAQ

SEQ ID NO: 3520 - protein, 11 aa, Artificial Sequence
  Synthesized
AQSNPYSASAQ

SEQ ID NO: 3521 - protein, 11 aa, Artificial Sequence
  Synthesized
AQSNQLRGNAQ

SEQ ID NO: 3522 - protein, 11 aa, Artificial Sequence
  Synthesized
AQSNRNVYDAQ

SEQ ID NO: 3523 - protein, 11 aa, Artificial Sequence
  Synthesized
AQSNRQAGMAQ

SEQ ID NO: 3524 - protein, 11 aa, Artificial Sequence
  Synthesized
AQSNRSGPVAQ

SEQ ID NO: 3525 - protein, 11 aa, Artificial Sequence
  Synthesized
AQSNRVSSLAQ

SEQ ID NO: 3526 - protein, 11 aa, Artificial Sequence
  Synthesized
AQSNSPLMGAQ

SEQ ID NO: 3527 - protein, 11 aa, Artificial Sequence
  Synthesized
AQSNSTKVTAQ

SEQ ID NO: 3528 - protein, 11 aa, Artificial Sequence
  Synthesized
AQSNSVKITAQ

SEQ ID NO: 3529 - protein, 11 aa, Artificial Sequence
  Synthesized
AQSNSVKMSAQ

SEQ ID NO: 3530 - protein, 11 aa, Artificial Sequence
  Synthesized
AQSNSVKSFAQ

SEQ ID NO: 3531 - protein, 11 aa, Artificial Sequence
  Synthesized
AQSNSVKTVAQ

SEQ ID NO: 3532 - protein, 11 aa, Artificial Sequence
  Synthesized
AQSNSVPDLAQ

SEQ ID NO: 3533 - protein, 11 aa, Artificial Sequence
  Synthesized
AQSNSVRLVAQ

SEQ ID NO: 3534 - protein, 11 aa, Artificial Sequence
  Synthesized
AQSNTGALSAQ

SEQ ID NO: 3535 - protein, 11 aa, Artificial Sequence
  Synthesized
AQSNTKLSLAQ

SEQ ID NO: 3536 - protein, 11 aa, Artificial Sequence
  Synthesized
AQSNTNVKYAQ

SEQ ID NO: 3537 - protein, 11 aa, Artificial Sequence
  Synthesized
AQSNTTKPYAQ

SEQ ID NO: 3538 - protein, 11 aa, Artificial Sequence
  Synthesized
AQSNTTRQTAQ

SEQ ID NO: 3539 - protein, 11 aa, Artificial Sequence
  Synthesized
AQSNTVKAMAQ

SEQ ID NO: 3540 - protein, 11 aa, Artificial Sequence
  Synthesized
AQSNVTLSDAQ

SEQ ID NO: 3541 - protein, 11 aa, Artificial Sequence
  Synthesized
AQSNVTRHGAQ

SEQ ID NO: 3542 - protein, 11 aa, Artificial Sequence
  Synthesized
AQSNVTRPSAQ

SEQ ID NO: 3543 - protein, 11 aa, Artificial Sequence
  Synthesized
AQSNYGTGMAQ

SEQ ID NO: 3544 - protein, 11 aa, Artificial Sequence
  Synthesized
AQSNYTRPPAQ

SEQ ID NO: 3545 - protein, 11 aa, Artificial Sequence
  Synthesized
AQSNYTRRGAQ

SEQ ID NO: 3546 - protein, 11 aa, Artificial Sequence
  Synthesized
AQSPAHKSGAQ

SEQ ID NO: 3547 - protein, 11 aa, Artificial Sequence
  Synthesized
AQSPATLHDAQ

SEQ ID NO: 3548 - protein, 11 aa, Artificial Sequence
  Synthesized
AQSPHRNGVAQ

SEQ ID NO: 3549 - protein, 11 aa, Artificial Sequence
  Synthesized
AQSPKMANTAQ

SEQ ID NO: 3550 - protein, 11 aa, Artificial Sequence
  Synthesized
AQSPLPHYPAQ

SEQ ID NO: 3551 - protein, 11 aa, Artificial Sequence
  Synthesized
AQSPLPPIDAQ

SEQ ID NO: 3552 - protein, 11 aa, Artificial Sequence
  Synthesized
AQSPLPRRFAQ

SEQ ID NO: 3553 - protein, 11 aa, Artificial Sequence
  Synthesized
AQSPLPRTPAQ

SEQ ID NO: 3554 - protein, 11 aa, Artificial Sequence
  Synthesized
AQSPLQLLSAQ

SEQ ID NO: 3555 - protein, 11 aa, Artificial Sequence
  Synthesized
AQSPNMYRPAQ

SEQ ID NO: 3556 - protein, 11 aa, Artificial Sequence
  Synthesized
AQSPPTLAPAQ

SEQ ID NO: 3557 - protein, 11 aa, Artificial Sequence
  Synthesized
AQSPRQADLAQ

SEQ ID NO: 3558 - protein, 11 aa, Artificial Sequence
  Synthesized
AQSPRQTTTAQ

SEQ ID NO: 3559 - protein, 11 aa, Artificial Sequence
  Synthesized
AQSPSIKNPAQ

SEQ ID NO: 3560 - protein, 11 aa, Artificial Sequence
  Synthesized
AQSPSRAPQAQ

SEQ ID NO: 3561 - protein, 11 aa, Artificial Sequence
  Synthesized
AQSPSSTARAQ

SEQ ID NO: 3562 - protein, 11 aa, Artificial Sequence
  Synthesized
AQSPTEARKAQ

SEQ ID NO: 3563 - protein, 11 aa, Artificial Sequence
  Synthesized
AQSPTRANQAQ

SEQ ID NO: 3564 - protein, 11 aa, Artificial Sequence
  Synthesized
AQSPTRSAMAQ

SEQ ID NO: 3565 - protein, 11 aa, Artificial Sequence
  Synthesized
AQSPTRSVGAQ

SEQ ID NO: 3566 - protein, 11 aa, Artificial Sequence
  Synthesized
AQSPVPTHRAQ

SEQ ID NO: 3567 - protein, 11 aa, Artificial Sequence
  Synthesized
AQSQAKNNNAQ

SEQ ID NO: 3568 - protein, 11 aa, Artificial Sequence
  Synthesized
AQSQASGMLAQ

SEQ ID NO: 3569 - protein, 11 aa, Artificial Sequence
  Synthesized
AQSQEPRTGAQ

SEQ ID NO: 3570 - protein, 11 aa, Artificial Sequence
  Synthesized
AQSQFTRSTAQ

SEQ ID NO: 3571 - protein, 11 aa, Artificial Sequence
  Synthesized
AQSQGNLRYAQ

SEQ ID NO: 3572 - protein, 11 aa, Artificial Sequence
  Synthesized
AQSQISASSAQ

SEQ ID NO: 3573 - protein, 11 aa, Artificial Sequence
  Synthesized
AQSQKKLMPAQ

SEQ ID NO: 3574 - protein, 11 aa, Artificial Sequence
  Synthesized
AQSQLGSLGAQ

SEQ ID NO: 3575 - protein, 11 aa, Artificial Sequence
  Synthesized
AQSQLKNSVAQ

SEQ ID NO: 3576 - protein, 11 aa, Artificial Sequence
  Synthesized
AQSQLPQRTAQ

SEQ ID NO: 3577 - protein, 11 aa, Artificial Sequence
  Synthesized
AQSQLPSRKAQ

SEQ ID NO: 3578 - protein, 11 aa, Artificial Sequence
  Synthesized
AQSQLSVTKAQ

SEQ ID NO: 3579 - protein, 11 aa, Artificial Sequence
  Synthesized
AQSQMQPKVAQ

SEQ ID NO: 3580 - protein, 11 aa, Artificial Sequence
  Synthesized
AQSQMSNSNAQ

SEQ ID NO: 3581 - protein, 11 aa, Artificial Sequence
  Synthesized
AQSQNKLPTAQ

SEQ ID NO: 3582 - protein, 11 aa, Artificial Sequence
  Synthesized
AQSQNLGIQAQ

SEQ ID NO: 3583 - protein, 11 aa, Artificial Sequence
  Synthesized
AQSQPPIGNAQ

SEQ ID NO: 3584 - protein, 11 aa, Artificial Sequence
  Synthesized
AQSQREPLRAQ

SEQ ID NO: 3585 - protein, 11 aa, Artificial Sequence
  Synthesized
AQSQRERSFAQ

SEQ ID NO: 3586 - protein, 11 aa, Artificial Sequence
  Synthesized
AQSQRLMADAQ

SEQ ID NO: 3587 - protein, 11 aa, Artificial Sequence
  Synthesized
AQSQRSKETAQ

SEQ ID NO: 3588 - protein, 11 aa, Artificial Sequence
  Synthesized
AQSQSALAPAQ

SEQ ID NO: 3589 - protein, 11 aa, Artificial Sequence
  Synthesized
AQSQSMPKNAQ

SEQ ID NO: 3590 - protein, 11 aa, Artificial Sequence
  Synthesized
AQSQTHIPNAQ

SEQ ID NO: 3591 - protein, 11 aa, Artificial Sequence
  Synthesized
AQSQTLTSDAQ

SEQ ID NO: 3592 - protein, 11 aa, Artificial Sequence
  Synthesized
AQSQTQSRQAQ

SEQ ID NO: 3593 - protein, 11 aa, Artificial Sequence
  Synthesized
AQSQTRTLPAQ

SEQ ID NO: 3594 - protein, 11 aa, Artificial Sequence
  Synthesized
AQSQVGRLPAQ

SEQ ID NO: 3595 - protein, 11 aa, Artificial Sequence
  Synthesized
AQSQVKNTAAQ

SEQ ID NO: 3596 - protein, 11 aa, Artificial Sequence
  Synthesized
AQSRALSGNAQ

SEQ ID NO: 3597 - protein, 11 aa, Artificial Sequence
  Synthesized
AQSRAVSDIAQ

SEQ ID NO: 3598 - protein, 11 aa, Artificial Sequence
  Synthesized
AQSRDMSPQAQ

SEQ ID NO: 3599 - protein, 11 aa, Artificial Sequence
  Synthesized
AQSRERMSAAQ

SEQ ID NO: 3600 - protein, 11 aa, Artificial Sequence
  Synthesized
AQSRERSLLAQ

SEQ ID NO: 3601 - protein, 11 aa, Artificial Sequence
  Synthesized
AQSRGGLVSAQ

SEQ ID NO: 3602 - protein, 11 aa, Artificial Sequence
  Synthesized
AQSRGHETQAQ

SEQ ID NO: 3603 - protein, 11 aa, Artificial Sequence
  Synthesized
AQSRGLSAMAQ

SEQ ID NO: 3604 - protein, 11 aa, Artificial Sequence
  Synthesized
AQSRGPSFMAQ

SEQ ID NO: 3605 - protein, 11 aa, Artificial Sequence
  Synthesized
AQSRGSVSPAQ

SEQ ID NO: 3606 - protein, 11 aa, Artificial Sequence
  Synthesized
AQSRIAPASAQ

SEQ ID NO: 3607 - protein, 11 aa, Artificial Sequence
  Synthesized
AQSRIFPSAAQ

SEQ ID NO: 3608 - protein, 11 aa, Artificial Sequence
  Synthesized
AQSRIPSSVAQ

SEQ ID NO: 3609 - protein, 11 aa, Artificial Sequence
  Synthesized
AQSRKEMDQAQ

SEQ ID NO: 3610 - protein, 11 aa, Artificial Sequence
  Synthesized
AQSRLATTAAQ

SEQ ID NO: 3611 - protein, 11 aa, Artificial Sequence
  Synthesized
AQSRLDLEVAQ

SEQ ID NO: 3612 - protein, 11 aa, Artificial Sequence
  Synthesized
AQSRLEARSAQ

SEQ ID NO: 3613 - protein, 11 aa, Artificial Sequence
  Synthesized
AQSRLERAQAQ

SEQ ID NO: 3614 - protein, 11 aa, Artificial Sequence
  Synthesized
AQSRLHAANAQ

SEQ ID NO: 3615 - protein, 11 aa, Artificial Sequence
  Synthesized
AQSRLLDHIAQ

SEQ ID NO: 3616 - protein, 11 aa, Artificial Sequence
  Synthesized
AQSRLPFGGAQ

SEQ ID NO: 3617 - protein, 11 aa, Artificial Sequence
  Synthesized
AQSRLPRFRAQ

SEQ ID NO: 3618 - protein, 11 aa, Artificial Sequence
  Synthesized
AQSRLPRKEAQ

SEQ ID NO: 3619 - protein, 11 aa, Artificial Sequence
  Synthesized
AQSRLVSSNAQ

SEQ ID NO: 3620 - protein, 11 aa, Artificial Sequence
  Synthesized
AQSRLVTTGAQ

SEQ ID NO: 3621 - protein, 11 aa, Artificial Sequence
  Synthesized
AQSRMADTSAQ

SEQ ID NO: 3622 - protein, 11 aa, Artificial Sequence
  Synthesized
AQSRMSSNAAQ

SEQ ID NO: 3623 - protein, 11 aa, Artificial Sequence
  Synthesized
AQSRMTPQTAQ

SEQ ID NO: 3624 - protein, 11 aa, Artificial Sequence
  Synthesized
AQSRNAVTPAQ

SEQ ID NO: 3625 - protein, 11 aa, Artificial Sequence
  Synthesized
AQSRNLVSNAQ

SEQ ID NO: 3626 - protein, 11 aa, Artificial Sequence
  Synthesized
AQSRNQAGSAQ

SEQ ID NO: 3627 - protein, 11 aa, Artificial Sequence
  Synthesized
AQSRNVTSAAQ

SEQ ID NO: 3628 - protein, 11 aa, Artificial Sequence
  Synthesized
AQSRPNNLTAQ

SEQ ID NO: 3629 - protein, 11 aa, Artificial Sequence
  Synthesized
AQSRQQPPLAQ

SEQ ID NO: 3630 - protein, 11 aa, Artificial Sequence
  Synthesized
AQSRRDTLTAQ

SEQ ID NO: 3631 - protein, 11 aa, Artificial Sequence
  Synthesized
AQSRRDVDMAQ

SEQ ID NO: 3632 - protein, 11 aa, Artificial Sequence
  Synthesized
AQSRSGTALAQ

SEQ ID NO: 3633 - protein, 11 aa, Artificial Sequence
  Synthesized
AQSRSMTDVAQ

SEQ ID NO: 3634 - protein, 11 aa, Artificial Sequence
  Synthesized
AQSRSPLPHAQ

SEQ ID NO: 3635 - protein, 11 aa, Artificial Sequence
  Synthesized
AQSRSQYTAAQ

SEQ ID NO: 3636 - protein, 11 aa, Artificial Sequence
  Synthesized
AQSRSSALSAQ

SEQ ID NO: 3637 - protein, 11 aa, Artificial Sequence
  Synthesized
AQSRSSEAPAQ

SEQ ID NO: 3638 - protein, 11 aa, Artificial Sequence
  Synthesized
AQSRTTLADAQ

SEQ ID NO: 3639 - protein, 11 aa, Artificial Sequence
  Synthesized
AQSRVNNQGAQ

SEQ ID NO: 3640 - protein, 11 aa, Artificial Sequence
  Synthesized
AQSRVQPSQAQ

SEQ ID NO: 3641 - protein, 11 aa, Artificial Sequence
  Synthesized
AQSRVSSTPAQ

SEQ ID NO: 3642 - protein, 11 aa, Artificial Sequence
  Synthesized
AQSSAANRAAQ

SEQ ID NO: 3643 - protein, 11 aa, Artificial Sequence
  Synthesized
AQSSAGHPNAQ

SEQ ID NO: 3644 - protein, 11 aa, Artificial Sequence
  Synthesized
AQSSAHLSTAQ

SEQ ID NO: 3645 - protein, 11 aa, Artificial Sequence
  Synthesized
AQSSAHTPSAQ

SEQ ID NO: 3646 - protein, 11 aa, Artificial Sequence
  Synthesized
AQSSAMRRDAQ

SEQ ID NO: 3647 - protein, 11 aa, Artificial Sequence
  Synthesized
AQSSAQQGYAQ

SEQ ID NO: 3648 - protein, 11 aa, Artificial Sequence
  Synthesized
AQSSARGIAAQ

SEQ ID NO: 3649 - protein, 11 aa, Artificial Sequence
  Synthesized
AQSSARPGYAQ

SEQ ID NO: 3650 - protein, 11 aa, Artificial Sequence
  Synthesized
AQSSASFPVAQ

SEQ ID NO: 3651 - protein, 11 aa, Artificial Sequence
  Synthesized
AQSSASRANAQ

SEQ ID NO: 3652 - protein, 11 aa, Artificial Sequence
  Synthesized
AQSSASRTTAQ

SEQ ID NO: 3653 - protein, 11 aa, Artificial Sequence
  Synthesized
AQSSDGSHTAQ

SEQ ID NO: 3654 - protein, 11 aa, Artificial Sequence
  Synthesized
AQSSDTARVAQ

SEQ ID NO: 3655 - protein, 11 aa, Artificial Sequence
  Synthesized
AQSSDTRMRAQ

SEQ ID NO: 3656 - protein, 11 aa, Artificial Sequence
  Synthesized
AQSSGIQQRAQ

SEQ ID NO: 3657 - protein, 11 aa, Artificial Sequence
  Synthesized
AQSSGISRDAQ

SEQ ID NO: 3658 - protein, 11 aa, Artificial Sequence
  Synthesized
AQSSGKLVLAQ

SEQ ID NO: 3659 - protein, 11 aa, Artificial Sequence
  Synthesized
AQSSGMNPVAQ

SEQ ID NO: 3660 - protein, 11 aa, Artificial Sequence
  Synthesized
AQSSGQHVAAQ

SEQ ID NO: 3661 - protein, 11 aa, Artificial Sequence
  Synthesized
AQSSGRPLQAQ

SEQ ID NO: 3662 - protein, 11 aa, Artificial Sequence
  Synthesized
AQSSGSSYSAQ

SEQ ID NO: 3663 - protein, 11 aa, Artificial Sequence
  Synthesized
AQSSHIKGHAQ

SEQ ID NO: 3664 - protein, 11 aa, Artificial Sequence
  Synthesized
AQSSIGRGLAQ

SEQ ID NO: 3665 - protein, 11 aa, Artificial Sequence
  Synthesized
AQSSIIRESAQ

SEQ ID NO: 3666 - protein, 11 aa, Artificial Sequence
  Synthesized
AQSSKLPVLAQ

SEQ ID NO: 3667 - protein, 11 aa, Artificial Sequence
  Synthesized
AQSSKSEPMAQ

SEQ ID NO: 3668 - protein, 11 aa, Artificial Sequence
  Synthesized
AQSSKSGSNAQ

SEQ ID NO: 3669 - protein, 11 aa, Artificial Sequence
  Synthesized
AQSSLEKGPAQ

SEQ ID NO: 3670 - protein, 11 aa, Artificial Sequence
  Synthesized
AQSSLGYGLAQ

SEQ ID NO: 3671 - protein, 11 aa, Artificial Sequence
  Synthesized
AQSSLHQKTAQ

SEQ ID NO: 3672 - protein, 11 aa, Artificial Sequence
  Synthesized
AQSSLQATRAQ

SEQ ID NO: 3673 - protein, 11 aa, Artificial Sequence
  Synthesized
AQSSLQMQHAQ

SEQ ID NO: 3674 - protein, 11 aa, Artificial Sequence
  Synthesized
AQSSLRSTPAQ

SEQ ID NO: 3675 - protein, 11 aa, Artificial Sequence
  Synthesized
AQSSLSTVKAQ

SEQ ID NO: 3676 - protein, 11 aa, Artificial Sequence
  Synthesized
AQSSLTPKAAQ

SEQ ID NO: 3677 - protein, 11 aa, Artificial Sequence
  Synthesized
AQSSLVQSMAQ

SEQ ID NO: 3678 - protein, 11 aa, Artificial Sequence
  Synthesized
AQSSMSLVSAQ

SEQ ID NO: 3679 - protein, 11 aa, Artificial Sequence
  Synthesized
AQSSMTVPLAQ

SEQ ID NO: 3680 - protein, 11 aa, Artificial Sequence
  Synthesized
AQSSNKLSTAQ

SEQ ID NO: 3681 - protein, 11 aa, Artificial Sequence
  Synthesized
AQSSNLTNLAQ

SEQ ID NO: 3682 - protein, 11 aa, Artificial Sequence
  Synthesized
AQSSNRATVAQ

SEQ ID NO: 3683 - protein, 11 aa, Artificial Sequence
  Synthesized
AQSSNVGLRAQ

SEQ ID NO: 3684 - protein, 11 aa, Artificial Sequence
  Synthesized
AQSSNYATPAQ

SEQ ID NO: 3685 - protein, 11 aa, Artificial Sequence
  Synthesized
AQSSPASGKAQ

SEQ ID NO: 3686 - protein, 11 aa, Artificial Sequence
  Synthesized
AQSSPNRQQAQ

SEQ ID NO: 3687 - protein, 11 aa, Artificial Sequence
  Synthesized
AQSSQNRTLAQ

SEQ ID NO: 3688 - protein, 11 aa, Artificial Sequence
  Synthesized
AQSSQSARIAQ

SEQ ID NO: 3689 - protein, 11 aa, Artificial Sequence
  Synthesized
AQSSRFPSPAQ

SEQ ID NO: 3690 - protein, 11 aa, Artificial Sequence
  Synthesized
AQSSRGSAAAQ

SEQ ID NO: 3691 - protein, 11 aa, Artificial Sequence
  Synthesized
AQSSRGTINAQ

SEQ ID NO: 3692 - protein, 11 aa, Artificial Sequence
  Synthesized
AQSSRGTVTAQ

SEQ ID NO: 3693 - protein, 11 aa, Artificial Sequence
  Synthesized
AQSSRNAGEAQ

SEQ ID NO: 3694 - protein, 11 aa, Artificial Sequence
  Synthesized
AQSSRNVSQAQ

SEQ ID NO: 3695 - protein, 11 aa, Artificial Sequence
  Synthesized
AQSSRTGLHAQ

SEQ ID NO: 3696 - protein, 11 aa, Artificial Sequence
  Synthesized
AQSSRTILGAQ

SEQ ID NO: 3697 - protein, 11 aa, Artificial Sequence
  Synthesized
AQSSRTSMDAQ

SEQ ID NO: 3698 - protein, 11 aa, Artificial Sequence
  Synthesized
AQSSSARIGAQ

SEQ ID NO: 3699 - protein, 11 aa, Artificial Sequence
  Synthesized
AQSSSLLSSAQ

SEQ ID NO: 3700 - protein, 11 aa, Artificial Sequence
  Synthesized
AQSSSMRQMAQ

SEQ ID NO: 3701 - protein, 11 aa, Artificial Sequence
  Synthesized
AQSSSPPTLAQ

SEQ ID NO: 3702 - protein, 11 aa, Artificial Sequence
  Synthesized
AQSSSQDNLAQ

SEQ ID NO: 3703 - protein, 11 aa, Artificial Sequence
  Synthesized
AQSSSQHSRAQ

SEQ ID NO: 3704 - protein, 11 aa, Artificial Sequence
  Synthesized
AQSSSQRYSAQ

SEQ ID NO: 3705 - protein, 11 aa, Artificial Sequence
  Synthesized
AQSSSQSFTAQ

SEQ ID NO: 3706 - protein, 11 aa, Artificial Sequence
  Synthesized
AQSSSQYFKAQ

SEQ ID NO: 3707 - protein, 11 aa, Artificial Sequence
  Synthesized
AQSSSRQALAQ

SEQ ID NO: 3708 - protein, 11 aa, Artificial Sequence
  Synthesized
AQSSSTQMRAQ

SEQ ID NO: 3709 - protein, 11 aa, Artificial Sequence
  Synthesized
AQSSSVAARAQ

SEQ ID NO: 3710 - protein, 11 aa, Artificial Sequence
  Synthesized
AQSSSVPGKAQ

SEQ ID NO: 3711 - protein, 11 aa, Artificial Sequence
  Synthesized
AQSSSVPRQAQ

SEQ ID NO: 3712 - protein, 11 aa, Artificial Sequence
  Synthesized
AQSSSYTIHAQ

SEQ ID NO: 3713 - protein, 11 aa, Artificial Sequence
  Synthesized
AQSSTAPGKAQ

SEQ ID NO: 3714 - protein, 11 aa, Artificial Sequence
  Synthesized
AQSSTGGLKAQ

SEQ ID NO: 3715 - protein, 11 aa, Artificial Sequence
  Synthesized
AQSSTIQSRAQ

SEQ ID NO: 3716 - protein, 11 aa, Artificial Sequence
  Synthesized
AQSSTISSKAQ

SEQ ID NO: 3717 - protein, 11 aa, Artificial Sequence
  Synthesized
AQSSTKGDLAQ

SEQ ID NO: 3718 - protein, 11 aa, Artificial Sequence
  Synthesized
AQSSTKNLQAQ

SEQ ID NO: 3719 - protein, 11 aa, Artificial Sequence
  Synthesized
AQSSTRMAQAQ

SEQ ID NO: 3720 - protein, 11 aa, Artificial Sequence
  Synthesized
AQSSTRSLGAQ

SEQ ID NO: 3721 - protein, 11 aa, Artificial Sequence
  Synthesized
AQSSTRSLNAQ

SEQ ID NO: 3722 - protein, 11 aa, Artificial Sequence
  Synthesized
AQSSTRSSFAQ

SEQ ID NO: 3723 - protein, 11 aa, Artificial Sequence
  Synthesized
AQSSTSNLVAQ

SEQ ID NO: 3724 - protein, 11 aa, Artificial Sequence
  Synthesized
AQSSTSQRYAQ

SEQ ID NO: 3725 - protein, 11 aa, Artificial Sequence
  Synthesized
AQSSTSRTDAQ

SEQ ID NO: 3726 - protein, 11 aa, Artificial Sequence
  Synthesized
AQSSTTDRKAQ

SEQ ID NO: 3727 - protein, 11 aa, Artificial Sequence
  Synthesized
AQSSTYVAGAQ

SEQ ID NO: 3728 - protein, 11 aa, Artificial Sequence
  Synthesized
AQSSVGAPPAQ

SEQ ID NO: 3729 - protein, 11 aa, Artificial Sequence
  Synthesized
AQSSVLSSHAQ

SEQ ID NO: 3730 - protein, 11 aa, Artificial Sequence
  Synthesized
AQSSVPNRGAQ

SEQ ID NO: 3731 - protein, 11 aa, Artificial Sequence
  Synthesized
AQSSVSAPPAQ

SEQ ID NO: 3732 - protein, 11 aa, Artificial Sequence
  Synthesized
AQSSVSSRQAQ

SEQ ID NO: 3733 - protein, 11 aa, Artificial Sequence
  Synthesized
AQSSVTPAKAQ

SEQ ID NO: 3734 - protein, 11 aa, Artificial Sequence
  Synthesized
AQSSWSMSEAQ

SEQ ID NO: 3735 - protein, 11 aa, Artificial Sequence
  Synthesized
AQSSYPNKNAQ

SEQ ID NO: 3736 - protein, 11 aa, Artificial Sequence
  Synthesized
AQSSYSAPKAQ

SEQ ID NO: 3737 - protein, 11 aa, Artificial Sequence
  Synthesized
AQSTAANSNAQ

SEQ ID NO: 3738 - protein, 11 aa, Artificial Sequence
  Synthesized
AQSTAAPTLAQ

SEQ ID NO: 3739 - protein, 11 aa, Artificial Sequence
  Synthesized
AQSTAGNAAAQ

SEQ ID NO: 3740 - protein, 11 aa, Artificial Sequence
  Synthesized
AQSTAGNVAAQ

SEQ ID NO: 3741 - protein, 11 aa, Artificial Sequence
  Synthesized
AQSTARDIPAQ

SEQ ID NO: 3742 - protein, 11 aa, Artificial Sequence
  Synthesized
AQSTARNAAAQ

SEQ ID NO: 3743 - protein, 11 aa, Artificial Sequence
  Synthesized
AQSTAVNAAAQ

SEQ ID NO: 3744 - protein, 11 aa, Artificial Sequence
  Synthesized
AQSTDASGWAQ

SEQ ID NO: 3745 - protein, 11 aa, Artificial Sequence
  Synthesized
AQSTDGNAAAQ

SEQ ID NO: 3746 - protein, 11 aa, Artificial Sequence
  Synthesized
AQSTDGSMNAQ

SEQ ID NO: 3747 - protein, 11 aa, Artificial Sequence
  Synthesized
AQSTDSIPMAQ

SEQ ID NO: 3748 - protein, 11 aa, Artificial Sequence
  Synthesized
AQSTFDEKLAQ

SEQ ID NO: 3749 - protein, 11 aa, Artificial Sequence
  Synthesized
AQSTGMPHPAQ

SEQ ID NO: 3750 - protein, 11 aa, Artificial Sequence
  Synthesized
AQSTGRNIVAQ

SEQ ID NO: 3751 - protein, 11 aa, Artificial Sequence
  Synthesized
AQSTGSLSRAQ

SEQ ID NO: 3752 - protein, 11 aa, Artificial Sequence
  Synthesized
AQSTGTGGRAQ

SEQ ID NO: 3753 - protein, 11 aa, Artificial Sequence
  Synthesized
AQSTKAMFAAQ

SEQ ID NO: 3754 - protein, 11 aa, Artificial Sequence
  Synthesized
AQSTKSPVNAQ

SEQ ID NO: 3755 - protein, 11 aa, Artificial Sequence
  Synthesized
AQSTKSSNVAQ

SEQ ID NO: 3756 - protein, 11 aa, Artificial Sequence
  Synthesized
AQSTLRPLSAQ

SEQ ID NO: 3757 - protein, 11 aa, Artificial Sequence
  Synthesized
AQSTLTKNSAQ

SEQ ID NO: 3758 - protein, 11 aa, Artificial Sequence
  Synthesized
AQSTPRLMTAQ

SEQ ID NO: 3759 - protein, 11 aa, Artificial Sequence
  Synthesized
AQSTPSAMSAQ

SEQ ID NO: 3760 - protein, 11 aa, Artificial Sequence
  Synthesized
AQSTPSMFAAQ

SEQ ID NO: 3761 - protein, 11 aa, Artificial Sequence
  Synthesized
AQSTQFSFMAQ

SEQ ID NO: 3762 - protein, 11 aa, Artificial Sequence
  Synthesized
AQSTQPSYKAQ

SEQ ID NO: 3763 - protein, 11 aa, Artificial Sequence
  Synthesized
AQSTRIQSPAQ

SEQ ID NO: 3764 - protein, 11 aa, Artificial Sequence
  Synthesized
AQSTRMNSPAQ

SEQ ID NO: 3765 - protein, 11 aa, Artificial Sequence
  Synthesized
AQSTRPAMSAQ

SEQ ID NO: 3766 - protein, 11 aa, Artificial Sequence
  Synthesized
AQSTRSFSAAQ

SEQ ID NO: 3767 - protein, 11 aa, Artificial Sequence
  Synthesized
AQSTRSTSTAQ

SEQ ID NO: 3768 - protein, 11 aa, Artificial Sequence
  Synthesized
AQSTSKSSLAQ

SEQ ID NO: 3769 - protein, 11 aa, Artificial Sequence
  Synthesized
AQSTSNNRSAQ

SEQ ID NO: 3770 - protein, 11 aa, Artificial Sequence
  Synthesized
AQSTSPSSSAQ

SEQ ID NO: 3771 - protein, 11 aa, Artificial Sequence
  Synthesized
AQSTSQTVNAQ

SEQ ID NO: 3772 - protein, 11 aa, Artificial Sequence
  Synthesized
AQSTSSTLLAQ

SEQ ID NO: 3773 - protein, 11 aa, Artificial Sequence
  Synthesized
AQSTTITRPAQ

SEQ ID NO: 3774 - protein, 11 aa, Artificial Sequence
  Synthesized
AQSTTRTAVAQ

SEQ ID NO: 3775 - protein, 11 aa, Artificial Sequence
  Synthesized
AQSTVLKNPAQ

SEQ ID NO: 3776 - protein, 11 aa, Artificial Sequence
  Synthesized
AQSTVRNEHAQ

SEQ ID NO: 3777 - protein, 11 aa, Artificial Sequence
  Synthesized
AQSTYKPSQAQ

SEQ ID NO: 3778 - protein, 11 aa, Artificial Sequence
  Synthesized
AQSTYLDNRAQ

SEQ ID NO: 3779 - protein, 11 aa, Artificial Sequence
  Synthesized
AQSVALISAAQ

SEQ ID NO: 3780 - protein, 11 aa, Artificial Sequence
  Synthesized
AQSVARSGFAQ

SEQ ID NO: 3781 - protein, 11 aa, Artificial Sequence
  Synthesized
AQSVDAKQLAQ

SEQ ID NO: 3782 - protein, 11 aa, Artificial Sequence
  Synthesized
AQSVEASVYAQ

SEQ ID NO: 3783 - protein, 11 aa, Artificial Sequence
  Synthesized
AQSVGTYTSAQ

SEQ ID NO: 3784 - protein, 11 aa, Artificial Sequence
  Synthesized
AQSVIAAGSAQ

SEQ ID NO: 3785 - protein, 11 aa, Artificial Sequence
  Synthesized
AQSVIPNLDAQ

SEQ ID NO: 3786 - protein, 11 aa, Artificial Sequence
  Synthesized
AQSVKGLTGAQ

SEQ ID NO: 3787 - protein, 11 aa, Artificial Sequence
  Synthesized
AQSVLPRRNAQ

SEQ ID NO: 3788 - protein, 11 aa, Artificial Sequence
  Synthesized
AQSVLSRVTAQ

SEQ ID NO: 3789 - protein, 11 aa, Artificial Sequence
  Synthesized
AQSVNRHDPAQ

SEQ ID NO: 3790 - protein, 11 aa, Artificial Sequence
  Synthesized
AQSVNRTGPAQ

SEQ ID NO: 3791 - protein, 11 aa, Artificial Sequence
  Synthesized
AQSVPRQGPAQ

SEQ ID NO: 3792 - protein, 11 aa, Artificial Sequence
  Synthesized
AQSVPSLKAAQ

SEQ ID NO: 3793 - protein, 11 aa, Artificial Sequence
  Synthesized
AQSVPSLKHAQ

SEQ ID NO: 3794 - protein, 11 aa, Artificial Sequence
  Synthesized
AQSVPTKGIAQ

SEQ ID NO: 3795 - protein, 11 aa, Artificial Sequence
  Synthesized
AQSVQQANKAQ

SEQ ID NO: 3796 - protein, 11 aa, Artificial Sequence
  Synthesized
AQSVRGSTHAQ

SEQ ID NO: 3797 - protein, 11 aa, Artificial Sequence
  Synthesized
AQSVRQNSMAQ

SEQ ID NO: 3798 - protein, 11 aa, Artificial Sequence
  Synthesized
AQSVRSQTVAQ

SEQ ID NO: 3799 - protein, 11 aa, Artificial Sequence
  Synthesized
AQSVRSSVPAQ

SEQ ID NO: 3800 - protein, 11 aa, Artificial Sequence
  Synthesized
AQSVSKTTVAQ

SEQ ID NO: 3801 - protein, 11 aa, Artificial Sequence
  Synthesized
AQSVSLASGAQ

SEQ ID NO: 3802 - protein, 11 aa, Artificial Sequence
  Synthesized
AQSVSLTSGAQ

SEQ ID NO: 3803 - protein, 11 aa, Artificial Sequence
  Synthesized
AQSVSPLRGAQ

SEQ ID NO: 3804 - protein, 11 aa, Artificial Sequence
  Synthesized
AQSVSRSNIAQ

SEQ ID NO: 3805 - protein, 11 aa, Artificial Sequence
  Synthesized
AQSVSSKNLAQ

SEQ ID NO: 3806 - protein, 11 aa, Artificial Sequence
  Synthesized
AQSVSSPLMAQ

SEQ ID NO: 3807 - protein, 11 aa, Artificial Sequence
  Synthesized
AQSVSTTQRAQ

SEQ ID NO: 3808 - protein, 11 aa, Artificial Sequence
  Synthesized
AQSVTKNFQAQ

SEQ ID NO: 3809 - protein, 11 aa, Artificial Sequence
  Synthesized
AQSVTNSTTAQ

SEQ ID NO: 3810 - protein, 11 aa, Artificial Sequence
  Synthesized
AQSVVDRRLAQ

SEQ ID NO: 3811 - protein, 11 aa, Artificial Sequence
  Synthesized
AQSVVNEKKAQ

SEQ ID NO: 3812 - protein, 11 aa, Artificial Sequence
  Synthesized
AQSVVPNHTAQ

SEQ ID NO: 3813 - protein, 11 aa, Artificial Sequence
  Synthesized
AQSYAKNMTAQ

SEQ ID NO: 3814 - protein, 11 aa, Artificial Sequence
  Synthesized
AQSYDPKKLAQ

SEQ ID NO: 3815 - protein, 11 aa, Artificial Sequence
  Synthesized
AQSYDRANTAQ

SEQ ID NO: 3816 - protein, 11 aa, Artificial Sequence
  Synthesized
AQSYLSKLPAQ

SEQ ID NO: 3817 - protein, 11 aa, Artificial Sequence
  Synthesized
AQSYSDKRSAQ

SEQ ID NO: 3818 - protein, 11 aa, Artificial Sequence
  Synthesized
AQSYSNRSVAQ

SEQ ID NO: 3819 - protein, 11 aa, Artificial Sequence
  Synthesized
AQSYSRTGAAQ

SEQ ID NO: 3820 - protein, 11 aa, Artificial Sequence
  Synthesized
AQSYTHTLRAQ

SEQ ID NO: 3821 - protein, 11 aa, Artificial Sequence
  Synthesized
AQSYTSKAAAQ

SEQ ID NO: 3822 - protein, 11 aa, Artificial Sequence
  Synthesized
AQSYTSQNSAQ

SEQ ID NO: 3823 - protein, 11 aa, Artificial Sequence
  Synthesized
AQTAAGTRSAQ

SEQ ID NO: 3824 - protein, 11 aa, Artificial Sequence
  Synthesized
AQTAAHSSSAQ

SEQ ID NO: 3825 - protein, 11 aa, Artificial Sequence
  Synthesized
AQTAALRTSAQ

SEQ ID NO: 3826 - protein, 11 aa, Artificial Sequence
  Synthesized
AQTAASHRSAQ

SEQ ID NO: 3827 - protein, 11 aa, Artificial Sequence
  Synthesized
AQTAGSTLSAQ

SEQ ID NO: 3828 - protein, 11 aa, Artificial Sequence
  Synthesized
AQTAHPPLLAQ

SEQ ID NO: 3829 - protein, 11 aa, Artificial Sequence
  Synthesized
AQTAIATLNAQ

SEQ ID NO: 3830 - protein, 11 aa, Artificial Sequence
  Synthesized
AQTAKLSMTAQ

SEQ ID NO: 3831 - protein, 11 aa, Artificial Sequence
  Synthesized
AQTAKYATIAQ

SEQ ID NO: 3832 - protein, 11 aa, Artificial Sequence
  Synthesized
AQTALGMKVAQ

SEQ ID NO: 3833 - protein, 11 aa, Artificial Sequence
  Synthesized
AQTALPHPFAQ

SEQ ID NO: 3834 - protein, 11 aa, Artificial Sequence
  Synthesized
AQTALPKKFAQ

SEQ ID NO: 3835 - protein, 11 aa, Artificial Sequence
  Synthesized
AQTALRSTMAQ

SEQ ID NO: 3836 - protein, 11 aa, Artificial Sequence
  Synthesized
AQTALSVSRAQ

SEQ ID NO: 3837 - protein, 11 aa, Artificial Sequence
  Synthesized
AQTAMNRAGAQ

SEQ ID NO: 3838 - protein, 11 aa, Artificial Sequence
  Synthesized
AQTAQVHVIAQ

SEQ ID NO: 3839 - protein, 11 aa, Artificial Sequence
  Synthesized
AQTARAIGSAQ

SEQ ID NO: 3840 - protein, 11 aa, Artificial Sequence
  Synthesized
AQTARFSNAAQ

SEQ ID NO: 3841 - protein, 11 aa, Artificial Sequence
  Synthesized
AQTARGLELAQ

SEQ ID NO: 3842 - protein, 11 aa, Artificial Sequence
  Synthesized
AQTARLPSAAQ

SEQ ID NO: 3843 - protein, 11 aa, Artificial Sequence
  Synthesized
AQTARSTSTAQ

SEQ ID NO: 3844 - protein, 11 aa, Artificial Sequence
  Synthesized
AQTARSVVTAQ

SEQ ID NO: 3845 - protein, 11 aa, Artificial Sequence
  Synthesized
AQTARVAANAQ

SEQ ID NO: 3846 - protein, 11 aa, Artificial Sequence
  Synthesized
AQTASNRSIAQ

SEQ ID NO: 3847 - protein, 11 aa, Artificial Sequence
  Synthesized
AQTASQNLKAQ

SEQ ID NO: 3848 - protein, 11 aa, Artificial Sequence
  Synthesized
AQTASRPSAAQ

SEQ ID NO: 3849 - protein, 11 aa, Artificial Sequence
  Synthesized
AQTASRTGSAQ

SEQ ID NO: 3850 - protein, 11 aa, Artificial Sequence
  Synthesized
AQTASSKMMAQ

SEQ ID NO: 3851 - protein, 11 aa, Artificial Sequence
  Synthesized
AQTASSLTRAQ

SEQ ID NO: 3852 - protein, 11 aa, Artificial Sequence
  Synthesized
AQTATMSNLAQ

SEQ ID NO: 3853 - protein, 11 aa, Artificial Sequence
  Synthesized
AQTATRLQQAQ

SEQ ID NO: 3854 - protein, 11 aa, Artificial Sequence
  Synthesized
AQTATRNPGAQ

SEQ ID NO: 3855 - protein, 11 aa, Artificial Sequence
  Synthesized
AQTATRSFMAQ

SEQ ID NO: 3856 - protein, 11 aa, Artificial Sequence
  Synthesized
AQTATTTTSAQ

SEQ ID NO: 3857 - protein, 11 aa, Artificial Sequence
  Synthesized
AQTAVNKTGAQ

SEQ ID NO: 3858 - protein, 11 aa, Artificial Sequence
  Synthesized
AQTAYQSESAQ

SEQ ID NO: 3859 - protein, 11 aa, Artificial Sequence
  Synthesized
AQTDARNDRAQ

SEQ ID NO: 3860 - protein, 11 aa, Artificial Sequence
  Synthesized
AQTDKVLRQAQ

SEQ ID NO: 3861 - protein, 11 aa, Artificial Sequence
  Synthesized
AQTDMQIGHAQ

SEQ ID NO: 3862 - protein, 11 aa, Artificial Sequence
  Synthesized
AQTDMRNTKAQ

SEQ ID NO: 3863 - protein, 11 aa, Artificial Sequence
  Synthesized
AQTDNASSRAQ

SEQ ID NO: 3864 - protein, 11 aa, Artificial Sequence
  Synthesized
AQTDRLVHNAQ

SEQ ID NO: 3865 - protein, 11 aa, Artificial Sequence
  Synthesized
AQTDRRMVPAQ

SEQ ID NO: 3866 - protein, 11 aa, Artificial Sequence
  Synthesized
AQTDRTNVKAQ

SEQ ID NO: 3867 - protein, 11 aa, Artificial Sequence
  Synthesized
AQTDSIRTPAQ

SEQ ID NO: 3868 - protein, 11 aa, Artificial Sequence
  Synthesized
AQTDSPKRYAQ

SEQ ID NO: 3869 - protein, 11 aa, Artificial Sequence
  Synthesized
AQTDVGLHSAQ

SEQ ID NO: 3870 - protein, 11 aa, Artificial Sequence
  Synthesized
AQTDVQLTQAQ

SEQ ID NO: 3871 - protein, 11 aa, Artificial Sequence
  Synthesized
AQTEARFTHAQ

SEQ ID NO: 3872 - protein, 11 aa, Artificial Sequence
  Synthesized
AQTEARTSRAQ

SEQ ID NO: 3873 - protein, 11 aa, Artificial Sequence
  Synthesized
AQTEKMVRHAQ

SEQ ID NO: 3874 - protein, 11 aa, Artificial Sequence
  Synthesized
AQTEKPRIYAQ

SEQ ID NO: 3875 - protein, 11 aa, Artificial Sequence
  Synthesized
AQTERHARDAQ

SEQ ID NO: 3876 - protein, 11 aa, Artificial Sequence
  Synthesized
AQTESFSFMAQ

SEQ ID NO: 3877 - protein, 11 aa, Artificial Sequence
  Synthesized
AQTESNKKLAQ

SEQ ID NO: 3878 - protein, 11 aa, Artificial Sequence
  Synthesized
AQTESSRNIAQ

SEQ ID NO: 3879 - protein, 11 aa, Artificial Sequence
  Synthesized
AQTEVSAPLAQ

SEQ ID NO: 3880 - protein, 11 aa, Artificial Sequence
  Synthesized
AQTEYYSFMAQ

SEQ ID NO: 3881 - protein, 11 aa, Artificial Sequence
  Synthesized
AQTFDASKLAQ

SEQ ID NO: 3882 - protein, 11 aa, Artificial Sequence
  Synthesized
AQTFGHQTVAQ

SEQ ID NO: 3883 - protein, 11 aa, Artificial Sequence
  Synthesized
AQTFHISFMAQ

SEQ ID NO: 3884 - protein, 11 aa, Artificial Sequence
  Synthesized
AQTGAVKSSAQ

SEQ ID NO: 3885 - protein, 11 aa, Artificial Sequence
  Synthesized
AQTGAYRSAAQ

SEQ ID NO: 3886 - protein, 11 aa, Artificial Sequence
  Synthesized
AQTGDNHQTAQ

SEQ ID NO: 3887 - protein, 11 aa, Artificial Sequence
  Synthesized
AQTGGAPSKAQ

SEQ ID NO: 3888 - protein, 11 aa, Artificial Sequence
  Synthesized
AQTGGVVRTAQ

SEQ ID NO: 3889 - protein, 11 aa, Artificial Sequence
  Synthesized
AQTGKLIHTAQ

SEQ ID NO: 3890 - protein, 11 aa, Artificial Sequence
  Synthesized
AQTGKYGTSAQ

SEQ ID NO: 3891 - protein, 11 aa, Artificial Sequence
  Synthesized
AQTGLKAPTAQ

SEQ ID NO: 3892 - protein, 11 aa, Artificial Sequence
  Synthesized
AQTGLPDFSAQ

SEQ ID NO: 3893 - protein, 11 aa, Artificial Sequence
  Synthesized
AQTGLPDMHAQ

SEQ ID NO: 3894 - protein, 11 aa, Artificial Sequence
  Synthesized
AQTGLPRFHAQ

SEQ ID NO: 3895 - protein, 11 aa, Artificial Sequence
  Synthesized
AQTGLRVVHAQ

SEQ ID NO: 3896 - protein, 11 aa, Artificial Sequence
  Synthesized
AQTGNLQTLAQ

SEQ ID NO: 3897 - protein, 11 aa, Artificial Sequence
  Synthesized
AQTGPKNELAQ

SEQ ID NO: 3898 - protein, 11 aa, Artificial Sequence
  Synthesized
AQTGRHVNTAQ

SEQ ID NO: 3899 - protein, 11 aa, Artificial Sequence
  Synthesized
AQTGRIITSAQ

SEQ ID NO: 3900 - protein, 11 aa, Artificial Sequence
  Synthesized
AQTGRINLDAQ

SEQ ID NO: 3901 - protein, 11 aa, Artificial Sequence
  Synthesized
AQTGRLLTSAQ

SEQ ID NO: 3902 - protein, 11 aa, Artificial Sequence
  Synthesized
AQTGRMDVLAQ

SEQ ID NO: 3903 - protein, 11 aa, Artificial Sequence
  Synthesized
AQTGRQDTIAQ

SEQ ID NO: 3904 - protein, 11 aa, Artificial Sequence
  Synthesized
AQTGRSTPNAQ

SEQ ID NO: 3905 - protein, 11 aa, Artificial Sequence
  Synthesized
AQTGRSVNVAQ

SEQ ID NO: 3906 - protein, 11 aa, Artificial Sequence
  Synthesized
AQTGSASPKAQ

SEQ ID NO: 3907 - protein, 11 aa, Artificial Sequence
  Synthesized
AQTGSGRNTAQ

SEQ ID NO: 3908 - protein, 11 aa, Artificial Sequence
  Synthesized
AQTGSIGHAAQ

SEQ ID NO: 3909 - protein, 11 aa, Artificial Sequence
  Synthesized
AQTGSLAQSAQ

SEQ ID NO: 3910 - protein, 11 aa, Artificial Sequence
  Synthesized
AQTGSLTNQAQ

SEQ ID NO: 3911 - protein, 11 aa, Artificial Sequence
  Synthesized
AQTGSLTVMAQ

SEQ ID NO: 3912 - protein, 11 aa, Artificial Sequence
  Synthesized
AQTGSLYLHAQ

SEQ ID NO: 3913 - protein, 11 aa, Artificial Sequence
  Synthesized
AQTGSQSIKAQ

SEQ ID NO: 3914 - protein, 11 aa, Artificial Sequence
  Synthesized
AQTGSRTMVAQ

SEQ ID NO: 3915 - protein, 11 aa, Artificial Sequence
  Synthesized
AQTHHAALLAQ

SEQ ID NO: 3916 - protein, 11 aa, Artificial Sequence
  Synthesized
AQTHIQRQDAQ

SEQ ID NO: 3917 - protein, 11 aa, Artificial Sequence
  Synthesized
AQTHISLQSAQ

SEQ ID NO: 3918 - protein, 11 aa, Artificial Sequence
  Synthesized
AQTHLPHNPAQ

SEQ ID NO: 3919 - protein, 11 aa, Artificial Sequence
  Synthesized
AQTHLPIFMAQ

SEQ ID NO: 3920 - protein, 11 aa, Artificial Sequence
  Synthesized
AQTHLPRHFAQ

SEQ ID NO: 3921 - protein, 11 aa, Artificial Sequence
  Synthesized
AQTHMKGSAAQ

SEQ ID NO: 3922 - protein, 11 aa, Artificial Sequence
  Synthesized
AQTHQTRSMAQ

SEQ ID NO: 3923 - protein, 11 aa, Artificial Sequence
  Synthesized
AQTHTVNSHAQ

SEQ ID NO: 3924 - protein, 11 aa, Artificial Sequence
  Synthesized
AQTHVSKVAAQ

SEQ ID NO: 3925 - protein, 11 aa, Artificial Sequence
  Synthesized
AQTIANTTPAQ

SEQ ID NO: 3926 - protein, 11 aa, Artificial Sequence
  Synthesized
AQTIASGKHAQ

SEQ ID NO: 3927 - protein, 11 aa, Artificial Sequence
  Synthesized
AQTIDFPKVAQ

SEQ ID NO: 3928 - protein, 11 aa, Artificial Sequence
  Synthesized
AQTIEYERTAQ

SEQ ID NO: 3929 - protein, 11 aa, Artificial Sequence
  Synthesized
AQTIGSLATAQ

SEQ ID NO: 3930 - protein, 11 aa, Artificial Sequence
  Synthesized
AQTIKFASSAQ

SEQ ID NO: 3931 - protein, 11 aa, Artificial Sequence
  Synthesized
AQTILPQKKAQ

SEQ ID NO: 3932 - protein, 11 aa, Artificial Sequence
  Synthesized
AQTINNRQPAQ

SEQ ID NO: 3933 - protein, 11 aa, Artificial Sequence
  Synthesized
AQTIPRSAMAQ

SEQ ID NO: 3934 - protein, 11 aa, Artificial Sequence
  Synthesized
AQTIQNNPKAQ

SEQ ID NO: 3935 - protein, 11 aa, Artificial Sequence
  Synthesized
AQTISQLPKAQ

SEQ ID NO: 3936 - protein, 11 aa, Artificial Sequence
  Synthesized
AQTISREVHAQ

SEQ ID NO: 3937 - protein, 11 aa, Artificial Sequence
  Synthesized
AQTITDSRTAQ

SEQ ID NO: 3938 - protein, 11 aa, Artificial Sequence
  Synthesized
AQTIVSSNPAQ

SEQ ID NO: 3939 - protein, 11 aa, Artificial Sequence
  Synthesized
AQTKASVMTAQ

SEQ ID NO: 3940 - protein, 11 aa, Artificial Sequence
  Synthesized
AQTKGVDMPAQ

SEQ ID NO: 3941 - protein, 11 aa, Artificial Sequence
  Synthesized
AQTKIYPGVAQ

SEQ ID NO: 3942 - protein, 11 aa, Artificial Sequence
  Synthesized
AQTKLHDRQAQ

SEQ ID NO: 3943 - protein, 11 aa, Artificial Sequence
  Synthesized
AQTKLLPSSAQ

SEQ ID NO: 3944 - protein, 11 aa, Artificial Sequence
  Synthesized
AQTKLSSVVAQ

SEQ ID NO: 3945 - protein, 11 aa, Artificial Sequence
  Synthesized
AQTKMTDVYAQ

SEQ ID NO: 3946 - protein, 11 aa, Artificial Sequence
  Synthesized
AQTKNNIMMAQ

SEQ ID NO: 3947 - protein, 11 aa, Artificial Sequence
  Synthesized
AQTKNVSAMAQ

SEQ ID NO: 3948 - protein, 11 aa, Artificial Sequence
  Synthesized
AQTKPMLSPAQ

SEQ ID NO: 3949 - protein, 11 aa, Artificial Sequence
  Synthesized
AQTKQVLGEAQ

SEQ ID NO: 3950 - protein, 11 aa, Artificial Sequence
  Synthesized
AQTKRDNNIAQ

SEQ ID NO: 3951 - protein, 11 aa, Artificial Sequence
  Synthesized
AQTKSGTWVAQ

SEQ ID NO: 3952 - protein, 11 aa, Artificial Sequence
  Synthesized
AQTKSSPYMAQ

SEQ ID NO: 3953 - protein, 11 aa, Artificial Sequence
  Synthesized
AQTKSTMNMAQ

SEQ ID NO: 3954 - protein, 11 aa, Artificial Sequence
  Synthesized
AQTKSTYVPAQ

SEQ ID NO: 3955 - protein, 11 aa, Artificial Sequence
  Synthesized
AQTKTATYHAQ

SEQ ID NO: 3956 - protein, 11 aa, Artificial Sequence
  Synthesized
AQTKTLGSYAQ

SEQ ID NO: 3957 - protein, 11 aa, Artificial Sequence
  Synthesized
AQTKTQMTVAQ

SEQ ID NO: 3958 - protein, 11 aa, Artificial Sequence
  Synthesized
AQTKVQTLNAQ

SEQ ID NO: 3959 - protein, 11 aa, Artificial Sequence
  Synthesized
AQTKYAIRDAQ

SEQ ID NO: 3960 - protein, 11 aa, Artificial Sequence
  Synthesized
AQTLADNKRAQ

SEQ ID NO: 3961 - protein, 11 aa, Artificial Sequence
  Synthesized
AQTLANPNVAQ

SEQ ID NO: 3962 - protein, 11 aa, Artificial Sequence
  Synthesized
AQTLHVNRIAQ

SEQ ID NO: 3963 - protein, 11 aa, Artificial Sequence
  Synthesized
AQTLKPPVNAQ

SEQ ID NO: 3964 - protein, 11 aa, Artificial Sequence
  Synthesized
AQTLKTEKLAQ

SEQ ID NO: 3965 - protein, 11 aa, Artificial Sequence
  Synthesized
AQTLNNPLKAQ

SEQ ID NO: 3966 - protein, 11 aa, Artificial Sequence
  Synthesized
AQTLPVKGTAQ

SEQ ID NO: 3967 - protein, 11 aa, Artificial Sequence
  Synthesized
AQTLQKSSVAQ

SEQ ID NO: 3968 - protein, 11 aa, Artificial Sequence
  Synthesized
AQTLQLDIGAQ

SEQ ID NO: 3969 - protein, 11 aa, Artificial Sequence
  Synthesized
AQTLRAHMDAQ

SEQ ID NO: 3970 - protein, 11 aa, Artificial Sequence
  Synthesized
AQTLRESTMAQ

SEQ ID NO: 3971 - protein, 11 aa, Artificial Sequence
  Synthesized
AQTLRGITDAQ

SEQ ID NO: 3972 - protein, 11 aa, Artificial Sequence
  Synthesized
AQTLRKSFMAQ

SEQ ID NO: 3973 - protein, 11 aa, Artificial Sequence
  Synthesized
AQTLRNVATAQ

SEQ ID NO: 3974 - protein, 11 aa, Artificial Sequence
  Synthesized
AQTLSGVCSAQ

SEQ ID NO: 3975 - protein, 11 aa, Artificial Sequence
  Synthesized
AQTLSMLANAQ

SEQ ID NO: 3976 - protein, 11 aa, Artificial Sequence
  Synthesized
AQTLSQMHAAQ

SEQ ID NO: 3977 - protein, 11 aa, Artificial Sequence
  Synthesized
AQTLTIGKNAQ

SEQ ID NO: 3978 - protein, 11 aa, Artificial Sequence
  Synthesized
AQTLTIPKSAQ

SEQ ID NO: 3979 - protein, 11 aa, Artificial Sequence
  Synthesized
AQTLVRDPTAQ

SEQ ID NO: 3980 - protein, 11 aa, Artificial Sequence
  Synthesized
AQTLYTPKMAQ

SEQ ID NO: 3981 - protein, 11 aa, Artificial Sequence
  Synthesized
AQTMAKFEKAQ

SEQ ID NO: 3982 - protein, 11 aa, Artificial Sequence
  Synthesized
AQTMGLSRGAQ

SEQ ID NO: 3983 - protein, 11 aa, Artificial Sequence
  Synthesized
AQTMKEVLVAQ

SEQ ID NO: 3984 - protein, 11 aa, Artificial Sequence
  Synthesized
AQTMKHNTNAQ

SEQ ID NO: 3985 - protein, 11 aa, Artificial Sequence
  Synthesized
AQTMKQEINAQ

SEQ ID NO: 3986 - protein, 11 aa, Artificial Sequence
  Synthesized
AQTMKSNLIAQ

SEQ ID NO: 3987 - protein, 11 aa, Artificial Sequence
  Synthesized
AQTMMETTRAQ

SEQ ID NO: 3988 - protein, 11 aa, Artificial Sequence
  Synthesized
AQTMMRSSMAQ

SEQ ID NO: 3989 - protein, 11 aa, Artificial Sequence
  Synthesized
AQTMPKSLIAQ

SEQ ID NO: 3990 - protein, 11 aa, Artificial Sequence
  Synthesized
AQTMQNKVLAQ

SEQ ID NO: 3991 - protein, 11 aa, Artificial Sequence
  Synthesized
AQTMRDVRAAQ

SEQ ID NO: 3992 - protein, 11 aa, Artificial Sequence
  Synthesized
AQTMRLSTAAQ

SEQ ID NO: 3993 - protein, 11 aa, Artificial Sequence
  Synthesized
AQTMRSTSLAQ

SEQ ID NO: 3994 - protein, 11 aa, Artificial Sequence
  Synthesized
AQTMSRLQAAQ

SEQ ID NO: 3995 - protein, 11 aa, Artificial Sequence
  Synthesized
AQTMTQIKTAQ

SEQ ID NO: 3996 - protein, 11 aa, Artificial Sequence
  Synthesized
AQTNASPVNAQ

SEQ ID NO: 3997 - protein, 11 aa, Artificial Sequence
  Synthesized
AQTNAYSSVAQ

SEQ ID NO: 3998 - protein, 11 aa, Artificial Sequence
  Synthesized
AQTNGYRQNAQ

SEQ ID NO: 3999 - protein, 11 aa, Artificial Sequence
  Synthesized
AQTNHTRRTAQ

SEQ ID NO: 4000 - protein, 11 aa, Artificial Sequence
  Synthesized
AQTNHVRSAAQ

SEQ ID NO: 4001 - protein, 11 aa, Artificial Sequence
  Synthesized
AQTNITRFHAQ

SEQ ID NO: 4002 - protein, 11 aa, Artificial Sequence
  Synthesized
AQTNLTKPSAQ

SEQ ID NO: 4003 - protein, 11 aa, Artificial Sequence
  Synthesized
AQTNLTRGHAQ

SEQ ID NO: 4004 - protein, 11 aa, Artificial Sequence
  Synthesized
AQTNMTKSQAQ

SEQ ID NO: 4005 - protein, 11 aa, Artificial Sequence
  Synthesized
AQTNNTIYMAQ

SEQ ID NO: 4006 - protein, 11 aa, Artificial Sequence
  Synthesized
AQTNNTKLAAQ

SEQ ID NO: 4007 - protein, 11 aa, Artificial Sequence
  Synthesized
AQTNNTYIFAQ

SEQ ID NO: 4008 - protein, 11 aa, Artificial Sequence
  Synthesized
AQTNPHPGSAQ

SEQ ID NO: 4009 - protein, 11 aa, Artificial Sequence
  Synthesized
AQTNPHRFSAQ

SEQ ID NO: 4010 - protein, 11 aa, Artificial Sequence
  Synthesized
AQTNPKVRSAQ

SEQ ID NO: 4011 - protein, 11 aa, Artificial Sequence
  Synthesized
AQTNPMHISAQ

SEQ ID NO: 4012 - protein, 11 aa, Artificial Sequence
  Synthesized
AQTNPTRIYAQ

SEQ ID NO: 4013 - protein, 11 aa, Artificial Sequence
  Synthesized
AQTNPTRNPAQ

SEQ ID NO: 4014 - protein, 11 aa, Artificial Sequence
  Synthesized
AQTNPVRRSAQ

SEQ ID NO: 4015 - protein, 11 aa, Artificial Sequence
  Synthesized
AQTNPVTRSAQ

SEQ ID NO: 4016 - protein, 11 aa, Artificial Sequence
  Synthesized
AQTNQSNRYAQ

SEQ ID NO: 4017 - protein, 11 aa, Artificial Sequence
  Synthesized
AQTNRAHFSAQ

SEQ ID NO: 4018 - protein, 11 aa, Artificial Sequence
  Synthesized
AQTNSQNVLAQ

SEQ ID NO: 4019 - protein, 11 aa, Artificial Sequence
  Synthesized
AQTNSVKATAQ

SEQ ID NO: 4020 - protein, 11 aa, Artificial Sequence
  Synthesized
AQTNTHVSKAQ

SEQ ID NO: 4021 - protein, 11 aa, Artificial Sequence
  Synthesized
AQTNTTKATAQ

SEQ ID NO: 4022 - protein, 11 aa, Artificial Sequence
  Synthesized
AQTNTTKSMAQ

SEQ ID NO: 4023 - protein, 11 aa, Artificial Sequence
  Synthesized
AQTNTVKELAQ

SEQ ID NO: 4024 - protein, 11 aa, Artificial Sequence
  Synthesized
AQTNTVRASAQ

SEQ ID NO: 4025 - protein, 11 aa, Artificial Sequence
  Synthesized
AQTNVTRGRAQ

SEQ ID NO: 4026 - protein, 11 aa, Artificial Sequence
  Synthesized
AQTNYANSRAQ

SEQ ID NO: 4027 - protein, 11 aa, Artificial Sequence
  Synthesized
AQTNYTRFQAQ

SEQ ID NO: 4028 - protein, 11 aa, Artificial Sequence
  Synthesized
AQTNYTRPLAQ

SEQ ID NO: 4029 - protein, 11 aa, Artificial Sequence
  Synthesized
AQTPGERMLAQ

SEQ ID NO: 4030 - protein, 11 aa, Artificial Sequence
  Synthesized
AQTPGSVVMAQ

SEQ ID NO: 4031 - protein, 11 aa, Artificial Sequence
  Synthesized
AQTPKFKASAQ

SEQ ID NO: 4032 - protein, 11 aa, Artificial Sequence
  Synthesized
AQTPLLVTRAQ

SEQ ID NO: 4033 - protein, 11 aa, Artificial Sequence
  Synthesized
AQTPLSTRTAQ

SEQ ID NO: 4034 - protein, 11 aa, Artificial Sequence
  Synthesized
AQTPMMSFMAQ

SEQ ID NO: 4035 - protein, 11 aa, Artificial Sequence
  Synthesized
AQTPRATDKAQ

SEQ ID NO: 4036 - protein, 11 aa, Artificial Sequence
  Synthesized
AQTPRVQPDAQ

SEQ ID NO: 4037 - protein, 11 aa, Artificial Sequence
  Synthesized
AQTPSITSGAQ

SEQ ID NO: 4038 - protein, 11 aa, Artificial Sequence
  Synthesized
AQTPTLTSPAQ

SEQ ID NO: 4039 - protein, 11 aa, Artificial Sequence
  Synthesized
AQTPTMSLRAQ

SEQ ID NO: 4040 - protein, 11 aa, Artificial Sequence
  Synthesized
AQTPTTSAKAQ

SEQ ID NO: 4041 - protein, 11 aa, Artificial Sequence
  Synthesized
AQTPTTSPHAQ

SEQ ID NO: 4042 - protein, 11 aa, Artificial Sequence
  Synthesized
AQTPYKHSTAQ

SEQ ID NO: 4043 - protein, 11 aa, Artificial Sequence
  Synthesized
AQTQAGSTLAQ

SEQ ID NO: 4044 - protein, 11 aa, Artificial Sequence
  Synthesized
AQTQARQTTAQ

SEQ ID NO: 4045 - protein, 11 aa, Artificial Sequence
  Synthesized
AQTQDRRMLAQ

SEQ ID NO: 4046 - protein, 11 aa, Artificial Sequence
  Synthesized
AQTQGIAQRAQ

SEQ ID NO: 4047 - protein, 11 aa, Artificial Sequence
  Synthesized
AQTQGSTSLAQ

SEQ ID NO: 4048 - protein, 11 aa, Artificial Sequence
  Synthesized
AQTQIQRQGAQ

SEQ ID NO: 4049 - protein, 11 aa, Artificial Sequence
  Synthesized
AQTQLGTSDAQ

SEQ ID NO: 4050 - protein, 11 aa, Artificial Sequence
  Synthesized
AQTQLKSTMAQ

SEQ ID NO: 4051 - protein, 11 aa, Artificial Sequence
  Synthesized
AQTQLPRDRAQ

SEQ ID NO: 4052 - protein, 11 aa, Artificial Sequence
  Synthesized
AQTQLTVQPAQ

SEQ ID NO: 4053 - protein, 11 aa, Artificial Sequence
  Synthesized
AQTQNLRTDAQ

SEQ ID NO: 4054 - protein, 11 aa, Artificial Sequence
  Synthesized
AQTQPTRTGAQ

SEQ ID NO: 4055 - protein, 11 aa, Artificial Sequence
  Synthesized
AQTQPTTNMAQ

SEQ ID NO: 4056 - protein, 11 aa, Artificial Sequence
  Synthesized
AQTQRSYTNAQ

SEQ ID NO: 4057 - protein, 11 aa, Artificial Sequence
  Synthesized
AQTQSALVKAQ

SEQ ID NO: 4058 - protein, 11 aa, Artificial Sequence
  Synthesized
AQTQSLSAMAQ

SEQ ID NO: 4059 - protein, 11 aa, Artificial Sequence
  Synthesized
AQTQSNIGRAQ

SEQ ID NO: 4060 - protein, 11 aa, Artificial Sequence
  Synthesized
AQTQTLTSDAQ

SEQ ID NO: 4061 - protein, 11 aa, Artificial Sequence
  Synthesized
AQTQTLTTSAQ

SEQ ID NO: 4062 - protein, 11 aa, Artificial Sequence
  Synthesized
AQTQTRVSGAQ

SEQ ID NO: 4063 - protein, 11 aa, Artificial Sequence
  Synthesized
AQTQVGVYDAQ

SEQ ID NO: 4064 - protein, 11 aa, Artificial Sequence
  Synthesized
AQTQVPSRLAQ

SEQ ID NO: 4065 - protein, 11 aa, Artificial Sequence
  Synthesized
AQTRALSAMAQ

SEQ ID NO: 4066 - protein, 11 aa, Artificial Sequence
  Synthesized
AQTRAQLGSAQ

SEQ ID NO: 4067 - protein, 11 aa, Artificial Sequence
  Synthesized
AQTRASDTKAQ

SEQ ID NO: 4068 - protein, 11 aa, Artificial Sequence
  Synthesized
AQTRDGTTTAQ

SEQ ID NO: 4069 - protein, 11 aa, Artificial Sequence
  Synthesized
AQTREHAKGAQ

SEQ ID NO: 4070 - protein, 11 aa, Artificial Sequence
  Synthesized
AQTRELMSGAQ

SEQ ID NO: 4071 - protein, 11 aa, Artificial Sequence
  Synthesized
AQTRENAQTAQ

SEQ ID NO: 4072 - protein, 11 aa, Artificial Sequence
  Synthesized
AQTRGAGTQAQ

SEQ ID NO: 4073 - protein, 11 aa, Artificial Sequence
  Synthesized
AQTRGSGHIAQ

SEQ ID NO: 4074 - protein, 11 aa, Artificial Sequence
  Synthesized
AQTRGSQPSAQ

SEQ ID NO: 4075 - protein, 11 aa, Artificial Sequence
  Synthesized
AQTRGSVAIAQ

SEQ ID NO: 4076 - protein, 11 aa, Artificial Sequence
  Synthesized
AQTRIPSVVAQ

SEQ ID NO: 4077 - protein, 11 aa, Artificial Sequence
  Synthesized
AQTRIQNMTAQ

SEQ ID NO: 4078 - protein, 11 aa, Artificial Sequence
  Synthesized
AQTRLLDPNAQ

SEQ ID NO: 4079 - protein, 11 aa, Artificial Sequence
  Synthesized
AQTRLPRGMAQ

SEQ ID NO: 4080 - protein, 11 aa, Artificial Sequence
  Synthesized
AQTRLSSVTAQ

SEQ ID NO: 4081 - protein, 11 aa, Artificial Sequence
  Synthesized
AQTRNDPNIAQ

SEQ ID NO: 4082 - protein, 11 aa, Artificial Sequence
  Synthesized
AQTRNHSGNAQ

SEQ ID NO: 4083 - protein, 11 aa, Artificial Sequence
  Synthesized
AQTRNQALTAQ

SEQ ID NO: 4084 - protein, 11 aa, Artificial Sequence
  Synthesized
AQTRQPDHNAQ

SEQ ID NO: 4085 - protein, 11 aa, Artificial Sequence
  Synthesized
AQTRQSSSIAQ

SEQ ID NO: 4086 - protein, 11 aa, Artificial Sequence
  Synthesized
AQTRSGATMAQ

SEQ ID NO: 4087 - protein, 11 aa, Artificial Sequence
  Synthesized
AQTRSKDITAQ

SEQ ID NO: 4088 - protein, 11 aa, Artificial Sequence
  Synthesized
AQTRSSTQIAQ

SEQ ID NO: 4089 - protein, 11 aa, Artificial Sequence
  Synthesized
AQTRSVSSDAQ

SEQ ID NO: 4090 - protein, 11 aa, Artificial Sequence
  Synthesized
AQTRTHQPEAQ

SEQ ID NO: 4091 - protein, 11 aa, Artificial Sequence
  Synthesized
AQTSAASHKAQ

SEQ ID NO: 4092 - protein, 11 aa, Artificial Sequence
  Synthesized
AQTSAGRASAQ

SEQ ID NO: 4093 - protein, 11 aa, Artificial Sequence
  Synthesized
AQTSAIDRNAQ

SEQ ID NO: 4094 - protein, 11 aa, Artificial Sequence
  Synthesized
AQTSASPSLAQ

SEQ ID NO: 4095 - protein, 11 aa, Artificial Sequence
  Synthesized
AQTSATAVRAQ

SEQ ID NO: 4096 - protein, 11 aa, Artificial Sequence
  Synthesized
AQTSFPGIKAQ

SEQ ID NO: 4097 - protein, 11 aa, Artificial Sequence
  Synthesized
AQTSGHTLQAQ

SEQ ID NO: 4098 - protein, 11 aa, Artificial Sequence
  Synthesized
AQTSGQRRDAQ

SEQ ID NO: 4099 - protein, 11 aa, Artificial Sequence
  Synthesized
AQTSHTSVQAQ

SEQ ID NO: 4100 - protein, 11 aa, Artificial Sequence
  Synthesized
AQTSIGRPDAQ

SEQ ID NO: 4101 - protein, 11 aa, Artificial Sequence
  Synthesized
AQTSISRLPAQ

SEQ ID NO: 4102 - protein, 11 aa, Artificial Sequence
  Synthesized
AQTSKSPVIAQ

SEQ ID NO: 4103 - protein, 11 aa, Artificial Sequence
  Synthesized
AQTSKSVSSAQ

SEQ ID NO: 4104 - protein, 11 aa, Artificial Sequence
  Synthesized
AQTSKTLPLAQ

SEQ ID NO: 4105 - protein, 11 aa, Artificial Sequence
  Synthesized
AQTSLELSRAQ

SEQ ID NO: 4106 - protein, 11 aa, Artificial Sequence
  Synthesized
AQTSLPRLEAQ

SEQ ID NO: 4107 - protein, 11 aa, Artificial Sequence
  Synthesized
AQTSLPRRDAQ

SEQ ID NO: 4108 - protein, 11 aa, Artificial Sequence
  Synthesized
AQTSLRATNAQ

SEQ ID NO: 4109 - protein, 11 aa, Artificial Sequence
  Synthesized
AQTSLYPHVAQ

SEQ ID NO: 4110 - protein, 11 aa, Artificial Sequence
  Synthesized
AQTSNQMMVAQ

SEQ ID NO: 4111 - protein, 11 aa, Artificial Sequence
  Synthesized
AQTSNRQVDAQ

SEQ ID NO: 4112 - protein, 11 aa, Artificial Sequence
  Synthesized
AQTSPQISLAQ

SEQ ID NO: 4113 - protein, 11 aa, Artificial Sequence
  Synthesized
AQTSPSSLRAQ

SEQ ID NO: 4114 - protein, 11 aa, Artificial Sequence
  Synthesized
AQTSQVTRIAQ

SEQ ID NO: 4115 - protein, 11 aa, Artificial Sequence
  Synthesized
AQTSREPDRAQ

SEQ ID NO: 4116 - protein, 11 aa, Artificial Sequence
  Synthesized
AQTSRESLIAQ

SEQ ID NO: 4117 - protein, 11 aa, Artificial Sequence
  Synthesized
AQTSRLHAEAQ

SEQ ID NO: 4118 - protein, 11 aa, Artificial Sequence
  Synthesized
AQTSRPTSLAQ

SEQ ID NO: 4119 - protein, 11 aa, Artificial Sequence
  Synthesized
AQTSRSSASAQ

SEQ ID NO: 4120 - protein, 11 aa, Artificial Sequence
  Synthesized
AQTSRSSSFAQ

SEQ ID NO: 4121 - protein, 11 aa, Artificial Sequence
  Synthesized
AQTSRSTPPAQ

SEQ ID NO: 4122 - protein, 11 aa, Artificial Sequence
  Synthesized
AQTSRTSPTAQ

SEQ ID NO: 4123 - protein, 11 aa, Artificial Sequence
  Synthesized
AQTSRVALDAQ

SEQ ID NO: 4124 - protein, 11 aa, Artificial Sequence
  Synthesized
AQTSRVSGDAQ

SEQ ID NO: 4125 - protein, 11 aa, Artificial Sequence
  Synthesized
AQTSSMHSVAQ

SEQ ID NO: 4126 - protein, 11 aa, Artificial Sequence
  Synthesized
AQTSSNRQLAQ

SEQ ID NO: 4127 - protein, 11 aa, Artificial Sequence
  Synthesized
AQTSSNRSHAQ

SEQ ID NO: 4128 - protein, 11 aa, Artificial Sequence
  Synthesized
AQTSSNVMRAQ

SEQ ID NO: 4129 - protein, 11 aa, Artificial Sequence
  Synthesized
AQTSSQNRLAQ

SEQ ID NO: 4130 - protein, 11 aa, Artificial Sequence
  Synthesized
AQTSSSAALAQ

SEQ ID NO: 4131 - protein, 11 aa, Artificial Sequence
  Synthesized
AQTSSSRLSAQ

SEQ ID NO: 4132 - protein, 11 aa, Artificial Sequence
  Synthesized
AQTSSTFPRAQ

SEQ ID NO: 4133 - protein, 11 aa, Artificial Sequence
  Synthesized
AQTSSVSRSAQ

SEQ ID NO: 4134 - protein, 11 aa, Artificial Sequence
  Synthesized
AQTSTAAKQAQ

SEQ ID NO: 4135 - protein, 11 aa, Artificial Sequence
  Synthesized
AQTSTKSAQAQ

SEQ ID NO: 4136 - protein, 11 aa, Artificial Sequence
  Synthesized
AQTSTLQVKAQ

SEQ ID NO: 4137 - protein, 11 aa, Artificial Sequence
  Synthesized
AQTSTQRTSAQ

SEQ ID NO: 4138 - protein, 11 aa, Artificial Sequence
  Synthesized
AQTSTRTITAQ

SEQ ID NO: 4139 - protein, 11 aa, Artificial Sequence
  Synthesized
AQTSTSDRPAQ

SEQ ID NO: 4140 - protein, 11 aa, Artificial Sequence
  Synthesized
AQTSTSSIRAQ

SEQ ID NO: 4141 - protein, 11 aa, Artificial Sequence
  Synthesized
AQTSTSSSRAQ

SEQ ID NO: 4142 - protein, 11 aa, Artificial Sequence
  Synthesized
AQTSTSSVSAQ

SEQ ID NO: 4143 - protein, 11 aa, Artificial Sequence
  Synthesized
AQTSVSRQAAQ

SEQ ID NO: 4144 - protein, 11 aa, Artificial Sequence
  Synthesized
AQTSVSSPSAQ

SEQ ID NO: 4145 - protein, 11 aa, Artificial Sequence
  Synthesized
AQTSVTAMKAQ

SEQ ID NO: 4146 - protein, 11 aa, Artificial Sequence
  Synthesized
AQTSYPAKLAQ

SEQ ID NO: 4147 - protein, 11 aa, Artificial Sequence
  Synthesized
AQTSYSGPSAQ

SEQ ID NO: 4148 - protein, 11 aa, Artificial Sequence
  Synthesized
AQTTAASAGAQ

SEQ ID NO: 4149 - protein, 11 aa, Artificial Sequence
  Synthesized
AQTTAAVNSAQ

SEQ ID NO: 4150 - protein, 11 aa, Artificial Sequence
  Synthesized
AQTTASYTDAQ

SEQ ID NO: 4151 - protein, 11 aa, Artificial Sequence
  Synthesized
AQTTDALVKAQ

SEQ ID NO: 4152 - protein, 11 aa, Artificial Sequence
  Synthesized
AQTTERARSAQ

SEQ ID NO: 4153 - protein, 11 aa, Artificial Sequence
  Synthesized
AQTTFSLPKAQ

SEQ ID NO: 4154 - protein, 11 aa, Artificial Sequence
  Synthesized
AQTTGILKSAQ

SEQ ID NO: 4155 - protein, 11 aa, Artificial Sequence
  Synthesized
AQTTGVPKFAQ

SEQ ID NO: 4156 - protein, 11 aa, Artificial Sequence
  Synthesized
AQTTHQSISAQ

SEQ ID NO: 4157 - protein, 11 aa, Artificial Sequence
  Synthesized
AQTTKAQLPAQ

SEQ ID NO: 4158 - protein, 11 aa, Artificial Sequence
  Synthesized
AQTTLISMHAQ

SEQ ID NO: 4159 - protein, 11 aa, Artificial Sequence
  Synthesized
AQTTLPRASAQ

SEQ ID NO: 4160 - protein, 11 aa, Artificial Sequence
  Synthesized
AQTTLSNFVAQ

SEQ ID NO: 4161 - protein, 11 aa, Artificial Sequence
  Synthesized
AQTTNARVSAQ

SEQ ID NO: 4162 - protein, 11 aa, Artificial Sequence
  Synthesized
AQTTNKVMSAQ

SEQ ID NO: 4163 - protein, 11 aa, Artificial Sequence
  Synthesized
AQTTNTNPAAQ

SEQ ID NO: 4164 - protein, 11 aa, Artificial Sequence
  Synthesized
AQTTQARLSAQ

SEQ ID NO: 4165 - protein, 11 aa, Artificial Sequence
  Synthesized
AQTTQQRQMAQ

SEQ ID NO: 4166 - protein, 11 aa, Artificial Sequence
  Synthesized
AQTTQRPLIAQ

SEQ ID NO: 4167 - protein, 11 aa, Artificial Sequence
  Synthesized
AQTTQTAMNAQ

SEQ ID NO: 4168 - protein, 11 aa, Artificial Sequence
  Synthesized
AQTTQTAMTAQ

SEQ ID NO: 4169 - protein, 11 aa, Artificial Sequence
  Synthesized
AQTTQTRASAQ

SEQ ID NO: 4170 - protein, 11 aa, Artificial Sequence
  Synthesized
AQTTRDQRDAQ

SEQ ID NO: 4171 - protein, 11 aa, Artificial Sequence
  Synthesized
AQTTRGMEAAQ

SEQ ID NO: 4172 - protein, 11 aa, Artificial Sequence
  Synthesized
AQTTRVQPDAQ

SEQ ID NO: 4173 - protein, 11 aa, Artificial Sequence
  Synthesized
AQTTSASNNAQ

SEQ ID NO: 4174 - protein, 11 aa, Artificial Sequence
  Synthesized
AQTTSASRLAQ

SEQ ID NO: 4175 - protein, 11 aa, Artificial Sequence
  Synthesized
AQTTSGSHLAQ

SEQ ID NO: 4176 - protein, 11 aa, Artificial Sequence
  Synthesized
AQTTSKGLMAQ

SEQ ID NO: 4177 - protein, 11 aa, Artificial Sequence
  Synthesized
AQTTSMHSKAQ

SEQ ID NO: 4178 - protein, 11 aa, Artificial Sequence
  Synthesized
AQTTSRITSAQ

SEQ ID NO: 4179 - protein, 11 aa, Artificial Sequence
  Synthesized
AQTTSRVLQAQ

SEQ ID NO: 4180 - protein, 11 aa, Artificial Sequence
  Synthesized
AQTTTAIHSAQ

SEQ ID NO: 4181 - protein, 11 aa, Artificial Sequence
  Synthesized
AQTTTGLGKAQ

SEQ ID NO: 4182 - protein, 11 aa, Artificial Sequence
  Synthesized
AQTTVGHKAAQ

SEQ ID NO: 4183 - protein, 11 aa, Artificial Sequence
  Synthesized
AQTTVGSRTAQ

SEQ ID NO: 4184 - protein, 11 aa, Artificial Sequence
  Synthesized
AQTTVRSNNAQ

SEQ ID NO: 4185 - protein, 11 aa, Artificial Sequence
  Synthesized
AQTTVSIPNAQ

SEQ ID NO: 4186 - protein, 11 aa, Artificial Sequence
  Synthesized
AQTVALTRMAQ

SEQ ID NO: 4187 - protein, 11 aa, Artificial Sequence
  Synthesized
AQTVATRLTAQ

SEQ ID NO: 4188 - protein, 11 aa, Artificial Sequence
  Synthesized
AQTVGKSLPAQ

SEQ ID NO: 4189 - protein, 11 aa, Artificial Sequence
  Synthesized
AQTVGKSLVAQ

SEQ ID NO: 4190 - protein, 11 aa, Artificial Sequence
  Synthesized
AQTVGQKSLAQ

SEQ ID NO: 4191 - protein, 11 aa, Artificial Sequence
  Synthesized
AQTVHSRNPAQ

SEQ ID NO: 4192 - protein, 11 aa, Artificial Sequence
  Synthesized
AQTVKGGLIAQ

SEQ ID NO: 4193 - protein, 11 aa, Artificial Sequence
  Synthesized
AQTVKTVSQAQ

SEQ ID NO: 4194 - protein, 11 aa, Artificial Sequence
  Synthesized
AQTVLAGSSAQ

SEQ ID NO: 4195 - protein, 11 aa, Artificial Sequence
  Synthesized
AQTVLGTNMAQ

SEQ ID NO: 4196 - protein, 11 aa, Artificial Sequence
  Synthesized
AQTVLSKHQAQ

SEQ ID NO: 4197 - protein, 11 aa, Artificial Sequence
  Synthesized
AQTVLSLTSAQ

SEQ ID NO: 4198 - protein, 11 aa, Artificial Sequence
  Synthesized
AQTVLSSSPAQ

SEQ ID NO: 4199 - protein, 11 aa, Artificial Sequence
  Synthesized
AQTVNDTPKAQ

SEQ ID NO: 4200 - protein, 11 aa, Artificial Sequence
  Synthesized
AQTVPTSKNAQ

SEQ ID NO: 4201 - protein, 11 aa, Artificial Sequence
  Synthesized
AQTVQGVRTAQ

SEQ ID NO: 4202 - protein, 11 aa, Artificial Sequence
  Synthesized
AQTVQIQSFAQ

SEQ ID NO: 4203 - protein, 11 aa, Artificial Sequence
  Synthesized
AQTVQNKAYAQ

SEQ ID NO: 4204 - protein, 11 aa, Artificial Sequence
  Synthesized
AQTVRSEHQAQ

SEQ ID NO: 4205 - protein, 11 aa, Artificial Sequence
  Synthesized
AQTVRSTIDAQ

SEQ ID NO: 4206 - protein, 11 aa, Artificial Sequence
  Synthesized
AQTVRTTNAAQ

SEQ ID NO: 4207 - protein, 11 aa, Artificial Sequence
  Synthesized
AQTVSGSSNAQ

SEQ ID NO: 4208 - protein, 11 aa, Artificial Sequence
  Synthesized
AQTVSIRSSAQ

SEQ ID NO: 4209 - protein, 11 aa, Artificial Sequence
  Synthesized
AQTVSSLSMAQ

SEQ ID NO: 4210 - protein, 11 aa, Artificial Sequence
  Synthesized
AQTVSSSRMAQ

SEQ ID NO: 4211 - protein, 11 aa, Artificial Sequence
  Synthesized
AQTVSTGKIAQ

SEQ ID NO: 4212 - protein, 11 aa, Artificial Sequence
  Synthesized
AQTVSTRLNAQ

SEQ ID NO: 4213 - protein, 11 aa, Artificial Sequence
  Synthesized
AQTVSVVKAAQ

SEQ ID NO: 4214 - protein, 11 aa, Artificial Sequence
  Synthesized
AQTVTMSSTAQ

SEQ ID NO: 4215 - protein, 11 aa, Artificial Sequence
  Synthesized
AQTVTNLRAAQ

SEQ ID NO: 4216 - protein, 11 aa, Artificial Sequence
  Synthesized
AQTVTSLRLAQ

SEQ ID NO: 4217 - protein, 11 aa, Artificial Sequence
  Synthesized
AQTVTSSTRAQ

SEQ ID NO: 4218 - protein, 11 aa, Artificial Sequence
  Synthesized
AQTVVKGSTAQ

SEQ ID NO: 4219 - protein, 11 aa, Artificial Sequence
  Synthesized
AQTVVPGTSAQ

SEQ ID NO: 4220 - protein, 11 aa, Artificial Sequence
  Synthesized
AQTVVTHTLAQ

SEQ ID NO: 4221 - protein, 11 aa, Artificial Sequence
  Synthesized
AQTVWANGSAQ

SEQ ID NO: 4222 - protein, 11 aa, Artificial Sequence
  Synthesized
AQTVYAAKSAQ

SEQ ID NO: 4223 - protein, 11 aa, Artificial Sequence
  Synthesized
AQTWCRHSDAQ

SEQ ID NO: 4224 - protein, 11 aa, Artificial Sequence
  Synthesized
AQTYDIAQSAQ

SEQ ID NO: 4225 - protein, 11 aa, Artificial Sequence
  Synthesized
AQTYGRTDTAQ

SEQ ID NO: 4226 - protein, 11 aa, Artificial Sequence
  Synthesized
AQTYGSEHLAQ

SEQ ID NO: 4227 - protein, 11 aa, Artificial Sequence
  Synthesized
AQTYLPEHPAQ

SEQ ID NO: 4228 - protein, 11 aa, Artificial Sequence
  Synthesized
AQTYLPVRYAQ

SEQ ID NO: 4229 - protein, 11 aa, Artificial Sequence
  Synthesized
AQTYSHSFMAQ

SEQ ID NO: 4230 - protein, 11 aa, Artificial Sequence
  Synthesized
AQTYTESADAQ

SEQ ID NO: 4231 - protein, 11 aa, Artificial Sequence
  Synthesized
AQVAAGSSSAQ

SEQ ID NO: 4232 - protein, 11 aa, Artificial Sequence
  Synthesized
AQVAAPTLRAQ

SEQ ID NO: 4233 - protein, 11 aa, Artificial Sequence
  Synthesized
AQVAARSSLAQ

SEQ ID NO: 4234 - protein, 11 aa, Artificial Sequence
  Synthesized
AQVAASPPAAQ

SEQ ID NO: 4235 - protein, 11 aa, Artificial Sequence
  Synthesized
AQVADFRATAQ

SEQ ID NO: 4236 - protein, 11 aa, Artificial Sequence
  Synthesized
AQVALPPLKAQ

SEQ ID NO: 4237 - protein, 11 aa, Artificial Sequence
  Synthesized
AQVALQSRTAQ

SEQ ID NO: 4238 - protein, 11 aa, Artificial Sequence
  Synthesized
AQVANDLYVAQ

SEQ ID NO: 4239 - protein, 11 aa, Artificial Sequence
  Synthesized
AQVANTSTKAQ

SEQ ID NO: 4240 - protein, 11 aa, Artificial Sequence
  Synthesized
AQVAQLSTLAQ

SEQ ID NO: 4241 - protein, 11 aa, Artificial Sequence
  Synthesized
AQVARGGSNAQ

SEQ ID NO: 4242 - protein, 11 aa, Artificial Sequence
  Synthesized
AQVARHVEQAQ

SEQ ID NO: 4243 - protein, 11 aa, Artificial Sequence
  Synthesized
AQVARNMERAQ

SEQ ID NO: 4244 - protein, 11 aa, Artificial Sequence
  Synthesized
AQVARTIPAAQ

SEQ ID NO: 4245 - protein, 11 aa, Artificial Sequence
  Synthesized
AQVASQLRSAQ

SEQ ID NO: 4246 - protein, 11 aa, Artificial Sequence
  Synthesized
AQVASTSAKAQ

SEQ ID NO: 4247 - protein, 11 aa, Artificial Sequence
  Synthesized
AQVATQPRFAQ

SEQ ID NO: 4248 - protein, 11 aa, Artificial Sequence
  Synthesized
AQVATQRQTAQ

SEQ ID NO: 4249 - protein, 11 aa, Artificial Sequence
  Synthesized
AQVDIQKRHAQ

SEQ ID NO: 4250 - protein, 11 aa, Artificial Sequence
  Synthesized
AQVDKRLLNAQ

SEQ ID NO: 4251 - protein, 11 aa, Artificial Sequence
  Synthesized
AQVDKVPRPAQ

SEQ ID NO: 4252 - protein, 11 aa, Artificial Sequence
  Synthesized
AQVDNGKIRAQ

SEQ ID NO: 4253 - protein, 11 aa, Artificial Sequence
  Synthesized
AQVDNGRLLAQ

SEQ ID NO: 4254 - protein, 11 aa, Artificial Sequence
  Synthesized
AQVDNRVNLAQ

SEQ ID NO: 4255 - protein, 11 aa, Artificial Sequence
  Synthesized
AQVDPLIQKAQ

SEQ ID NO: 4256 - protein, 11 aa, Artificial Sequence
  Synthesized
AQVDRQSRNAQ

SEQ ID NO: 4257 - protein, 11 aa, Artificial Sequence
  Synthesized
AQVERSPAQAQ

SEQ ID NO: 4258 - protein, 11 aa, Artificial Sequence
  Synthesized
AQVETSVASAQ

SEQ ID NO: 4259 - protein, 11 aa, Artificial Sequence
  Synthesized
AQVFLSNTPAQ

SEQ ID NO: 4260 - protein, 11 aa, Artificial Sequence
  Synthesized
AQVFSVASVAQ

SEQ ID NO: 4261 - protein, 11 aa, Artificial Sequence
  Synthesized
AQVFYFSAMAQ

SEQ ID NO: 4262 - protein, 11 aa, Artificial Sequence
  Synthesized
AQVGAKPFVAQ

SEQ ID NO: 4263 - protein, 11 aa, Artificial Sequence
  Synthesized
AQVGFNSAVAQ

SEQ ID NO: 4264 - protein, 11 aa, Artificial Sequence
  Synthesized
AQVGGVGRPAQ

SEQ ID NO: 4265 - protein, 11 aa, Artificial Sequence
  Synthesized
AQVGHYPHSAQ

SEQ ID NO: 4266 - protein, 11 aa, Artificial Sequence
  Synthesized
AQVGKIPTLAQ

SEQ ID NO: 4267 - protein, 11 aa, Artificial Sequence
  Synthesized
AQVGLGQVRAQ

SEQ ID NO: 4268 - protein, 11 aa, Artificial Sequence
  Synthesized
AQVGNINLRAQ

SEQ ID NO: 4269 - protein, 11 aa, Artificial Sequence
  Synthesized
AQVGQVKNVAQ

SEQ ID NO: 4270 - protein, 11 aa, Artificial Sequence
  Synthesized
AQVGQVVPKAQ

SEQ ID NO: 4271 - protein, 11 aa, Artificial Sequence
  Synthesized
AQVGRIGPEAQ

SEQ ID NO: 4272 - protein, 11 aa, Artificial Sequence
  Synthesized
AQVGRNSSTAQ

SEQ ID NO: 4273 - protein, 11 aa, Artificial Sequence
  Synthesized
AQVGRSLTNAQ

SEQ ID NO: 4274 - protein, 11 aa, Artificial Sequence
  Synthesized
AQVGTDSHPAQ

SEQ ID NO: 4275 - protein, 11 aa, Artificial Sequence
  Synthesized
AQVGYGAKPAQ

SEQ ID NO: 4276 - protein, 11 aa, Artificial Sequence
  Synthesized
AQVHLPFPFAQ

SEQ ID NO: 4277 - protein, 11 aa, Artificial Sequence
  Synthesized
AQVHLPGFVAQ

SEQ ID NO: 4278 - protein, 11 aa, Artificial Sequence
  Synthesized
AQVHRDTTLAQ

SEQ ID NO: 4279 - protein, 11 aa, Artificial Sequence
  Synthesized
AQVHRSEVNAQ

SEQ ID NO: 4280 - protein, 11 aa, Artificial Sequence
  Synthesized
AQVHVKTGTAQ

SEQ ID NO: 4281 - protein, 11 aa, Artificial Sequence
  Synthesized
AQVIENQKVAQ

SEQ ID NO: 4282 - protein, 11 aa, Artificial Sequence
  Synthesized
AQVIHRDSPAQ

SEQ ID NO: 4283 - protein, 11 aa, Artificial Sequence
  Synthesized
AQVILPRPDAQ

SEQ ID NO: 4284 - protein, 11 aa, Artificial Sequence
  Synthesized
AQVINVQQPAQ

SEQ ID NO: 4285 - protein, 11 aa, Artificial Sequence
  Synthesized
AQVIQQPGPAQ

SEQ ID NO: 4286 - protein, 11 aa, Artificial Sequence
  Synthesized
AQVIRGQSPAQ

SEQ ID NO: 4287 - protein, 11 aa, Artificial Sequence
  Synthesized
AQVKGNSLTAQ

SEQ ID NO: 4288 - protein, 11 aa, Artificial Sequence
  Synthesized
AQVKGYPQLAQ

SEQ ID NO: 4289 - protein, 11 aa, Artificial Sequence
  Synthesized
AQVKKDLSMAQ

SEQ ID NO: 4290 - protein, 11 aa, Artificial Sequence
  Synthesized
AQVKLVREDAQ

SEQ ID NO: 4291 - protein, 11 aa, Artificial Sequence
  Synthesized
AQVKMSLPTAQ

SEQ ID NO: 4292 - protein, 11 aa, Artificial Sequence
  Synthesized
AQVKPLHYVAQ

SEQ ID NO: 4293 - protein, 11 aa, Artificial Sequence
  Synthesized
AQVKPNYSSAQ

SEQ ID NO: 4294 - protein, 11 aa, Artificial Sequence
  Synthesized
AQVKQYSAMAQ

SEQ ID NO: 4295 - protein, 11 aa, Artificial Sequence
  Synthesized
AQVKSATNNAQ

SEQ ID NO: 4296 - protein, 11 aa, Artificial Sequence
  Synthesized
AQVKSLSLVAQ

SEQ ID NO: 4297 - protein, 11 aa, Artificial Sequence
  Synthesized
AQVKSNYVGAQ

SEQ ID NO: 4298 - protein, 11 aa, Artificial Sequence
  Synthesized
AQVKSSLVTAQ

SEQ ID NO: 4299 - protein, 11 aa, Artificial Sequence
  Synthesized
AQVKSSNYVAQ

SEQ ID NO: 4300 - protein, 11 aa, Artificial Sequence
  Synthesized
AQVKTSTMAAQ

SEQ ID NO: 4301 - protein, 11 aa, Artificial Sequence
  Synthesized
AQVLASRDKAQ

SEQ ID NO: 4302 - protein, 11 aa, Artificial Sequence
  Synthesized
AQVLGKGMTAQ

SEQ ID NO: 4303 - protein, 11 aa, Artificial Sequence
  Synthesized
AQVLGSGVGAQ

SEQ ID NO: 4304 - protein, 11 aa, Artificial Sequence
  Synthesized
AQVLKMVSPAQ

SEQ ID NO: 4305 - protein, 11 aa, Artificial Sequence
  Synthesized
AQVLKSGPSAQ

SEQ ID NO: 4306 - protein, 11 aa, Artificial Sequence
  Synthesized
AQVLMSKETAQ

SEQ ID NO: 4307 - protein, 11 aa, Artificial Sequence
  Synthesized
AQVLNAYGSAQ

SEQ ID NO: 4308 - protein, 11 aa, Artificial Sequence
  Synthesized
AQVLNHNSKAQ

SEQ ID NO: 4309 - protein, 11 aa, Artificial Sequence
  Synthesized
AQVLNVNPKAQ

SEQ ID NO: 4310 - protein, 11 aa, Artificial Sequence
  Synthesized
AQVLNYPKGAQ

SEQ ID NO: 4311 - protein, 11 aa, Artificial Sequence
  Synthesized
AQVLPQGQIAQ

SEQ ID NO: 4312 - protein, 11 aa, Artificial Sequence
  Synthesized
AQVLPSLRGAQ

SEQ ID NO: 4313 - protein, 11 aa, Artificial Sequence
  Synthesized
AQVLRSVNGAQ

SEQ ID NO: 4314 - protein, 11 aa, Artificial Sequence
  Synthesized
AQVLRTSATAQ

SEQ ID NO: 4315 - protein, 11 aa, Artificial Sequence
  Synthesized
AQVLSKSQIAQ

SEQ ID NO: 4316 - protein, 11 aa, Artificial Sequence
  Synthesized
AQVLSPLTRAQ

SEQ ID NO: 4317 - protein, 11 aa, Artificial Sequence
  Synthesized
AQVLSRFDEAQ

SEQ ID NO: 4318 - protein, 11 aa, Artificial Sequence
  Synthesized
AQVLSSSVDAQ

SEQ ID NO: 4319 - protein, 11 aa, Artificial Sequence
  Synthesized
AQVLSTSRTAQ

SEQ ID NO: 4320 - protein, 11 aa, Artificial Sequence
  Synthesized
AQVLTKGYGAQ

SEQ ID NO: 4321 - protein, 11 aa, Artificial Sequence
  Synthesized
AQVLTPTNSAQ

SEQ ID NO: 4322 - protein, 11 aa, Artificial Sequence
  Synthesized
AQVLVPTADAQ

SEQ ID NO: 4323 - protein, 11 aa, Artificial Sequence
  Synthesized
AQVMGKSGTAQ

SEQ ID NO: 4324 - protein, 11 aa, Artificial Sequence
  Synthesized
AQVMKSSQLAQ

SEQ ID NO: 4325 - protein, 11 aa, Artificial Sequence
  Synthesized
AQVMLPRLKAQ

SEQ ID NO: 4326 - protein, 11 aa, Artificial Sequence
  Synthesized
AQVMPARNGAQ

SEQ ID NO: 4327 - protein, 11 aa, Artificial Sequence
  Synthesized
AQVMPTSMSAQ

SEQ ID NO: 4328 - protein, 11 aa, Artificial Sequence
  Synthesized
AQVMPTSRTAQ

SEQ ID NO: 4329 - protein, 11 aa, Artificial Sequence
  Synthesized
AQVMRSANQAQ

SEQ ID NO: 4330 - protein, 11 aa, Artificial Sequence
  Synthesized
AQVMSRGSSAQ

SEQ ID NO: 4331 - protein, 11 aa, Artificial Sequence
  Synthesized
AQVNARMPNAQ

SEQ ID NO: 4332 - protein, 11 aa, Artificial Sequence
  Synthesized
AQVNATRNVAQ

SEQ ID NO: 4333 - protein, 11 aa, Artificial Sequence
  Synthesized
AQVNFTRVPAQ

SEQ ID NO: 4334 - protein, 11 aa, Artificial Sequence
  Synthesized
AQVNHSLRSAQ

SEQ ID NO: 4335 - protein, 11 aa, Artificial Sequence
  Synthesized
AQVNHTKGLAQ

SEQ ID NO: 4336 - protein, 11 aa, Artificial Sequence
  Synthesized
AQVNHTRRHAQ

SEQ ID NO: 4337 - protein, 11 aa, Artificial Sequence
  Synthesized
AQVNKISNSAQ

SEQ ID NO: 4338 - protein, 11 aa, Artificial Sequence
  Synthesized
AQVNKLVHAAQ

SEQ ID NO: 4339 - protein, 11 aa, Artificial Sequence
  Synthesized
AQVNKTRGYAQ

SEQ ID NO: 4340 - protein, 11 aa, Artificial Sequence
  Synthesized
AQVNMKNTAAQ

SEQ ID NO: 4341 - protein, 11 aa, Artificial Sequence
  Synthesized
AQVNMKSFMAQ

SEQ ID NO: 4342 - protein, 11 aa, Artificial Sequence
  Synthesized
AQVNNAVRNAQ

SEQ ID NO: 4343 - protein, 11 aa, Artificial Sequence
  Synthesized
AQVNNTFHQAQ

SEQ ID NO: 4344 - protein, 11 aa, Artificial Sequence
  Synthesized
AQVNNTFHRAQ

SEQ ID NO: 4345 - protein, 11 aa, Artificial Sequence
  Synthesized
AQVNNTIYGAQ

SEQ ID NO: 4346 - protein, 11 aa, Artificial Sequence
  Synthesized
AQVNPHYISAQ

SEQ ID NO: 4347 - protein, 11 aa, Artificial Sequence
  Synthesized
AQVNPKIKSAQ

SEQ ID NO: 4348 - protein, 11 aa, Artificial Sequence
  Synthesized
AQVNPKPFSAQ

SEQ ID NO: 4349 - protein, 11 aa, Artificial Sequence
  Synthesized
AQVNPQRPSAQ

SEQ ID NO: 4350 - protein, 11 aa, Artificial Sequence
  Synthesized
AQVNPQTGRAQ

SEQ ID NO: 4351 - protein, 11 aa, Artificial Sequence
  Synthesized
AQVNPSGMQAQ

SEQ ID NO: 4352 - protein, 11 aa, Artificial Sequence
  Synthesized
AQVNPSNISAQ

SEQ ID NO: 4353 - protein, 11 aa, Artificial Sequence
  Synthesized
AQVNPTRHTAQ

SEQ ID NO: 4354 - protein, 11 aa, Artificial Sequence
  Synthesized
AQVNPYQGSAQ

SEQ ID NO: 4355 - protein, 11 aa, Artificial Sequence
  Synthesized
AQVNRAYASAQ

SEQ ID NO: 4356 - protein, 11 aa, Artificial Sequence
  Synthesized
AQVNRQSNDAQ

SEQ ID NO: 4357 - protein, 11 aa, Artificial Sequence
  Synthesized
AQVNRSNVLAQ

SEQ ID NO: 4358 - protein, 11 aa, Artificial Sequence
  Synthesized
AQVNRTRGIAQ

SEQ ID NO: 4359 - protein, 11 aa, Artificial Sequence
  Synthesized
AQVNRTRHEAQ

SEQ ID NO: 4360 - protein, 11 aa, Artificial Sequence
  Synthesized
AQVNRTRPAAQ

SEQ ID NO: 4361 - protein, 11 aa, Artificial Sequence
  Synthesized
AQVNRTRRPAQ

SEQ ID NO: 4362 - protein, 11 aa, Artificial Sequence
  Synthesized
AQVNSSIRNAQ

SEQ ID NO: 4363 - protein, 11 aa, Artificial Sequence
  Synthesized
AQVNSTKSTAQ

SEQ ID NO: 4364 - protein, 11 aa, Artificial Sequence
  Synthesized
AQVNSTKYTAQ

SEQ ID NO: 4365 - protein, 11 aa, Artificial Sequence
  Synthesized
AQVNSTKYVAQ

SEQ ID NO: 4366 - protein, 11 aa, Artificial Sequence
  Synthesized
AQVNSTRNQAQ

SEQ ID NO: 4367 - protein, 11 aa, Artificial Sequence
  Synthesized
AQVNTQPMAAQ

SEQ ID NO: 4368 - protein, 11 aa, Artificial Sequence
  Synthesized
AQVNTRTNDAQ

SEQ ID NO: 4369 - protein, 11 aa, Artificial Sequence
  Synthesized
AQVNVQIAQAQ

SEQ ID NO: 4370 - protein, 11 aa, Artificial Sequence
  Synthesized
AQVPAKPPLAQ

SEQ ID NO: 4371 - protein, 11 aa, Artificial Sequence
  Synthesized
AQVPKSSLLAQ

SEQ ID NO: 4372 - protein, 11 aa, Artificial Sequence
  Synthesized
AQVPLPIFHAQ

SEQ ID NO: 4373 - protein, 11 aa, Artificial Sequence
  Synthesized
AQVPNDPRRAQ

SEQ ID NO: 4374 - protein, 11 aa, Artificial Sequence
  Synthesized
AQVPNISFMAQ

SEQ ID NO: 4375 - protein, 11 aa, Artificial Sequence
  Synthesized
AQVPNKMTFPQ

SEQ ID NO: 4376 - protein, 11 aa, Artificial Sequence
  Synthesized
AQVPPSAGRAQ

SEQ ID NO: 4377 - protein, 11 aa, Artificial Sequence
  Synthesized
AQVPQANMRAQ

SEQ ID NO: 4378 - protein, 11 aa, Artificial Sequence
  Synthesized
AQVPQASRVAQ

SEQ ID NO: 4379 - protein, 11 aa, Artificial Sequence
  Synthesized
AQVPQASSDAQ

SEQ ID NO: 4380 - protein, 11 aa, Artificial Sequence
  Synthesized
AQVPQSSRDAQ

SEQ ID NO: 4381 - protein, 11 aa, Artificial Sequence
  Synthesized
AQVPQTNRPAQ

SEQ ID NO: 4382 - protein, 11 aa, Artificial Sequence
  Synthesized
AQVPRAESTAQ

SEQ ID NO: 4383 - protein, 11 aa, Artificial Sequence
  Synthesized
AQVPRTYPMAQ

SEQ ID NO: 4384 - protein, 11 aa, Artificial Sequence
  Synthesized
AQVPSRNSTAQ

SEQ ID NO: 4385 - protein, 11 aa, Artificial Sequence
  Synthesized
AQVPTGQMGAQ

SEQ ID NO: 4386 - protein, 11 aa, Artificial Sequence
  Synthesized
AQVQGKTSFAQ

SEQ ID NO: 4387 - protein, 11 aa, Artificial Sequence
  Synthesized
AQVQIPRSSAQ

SEQ ID NO: 4388 - protein, 11 aa, Artificial Sequence
  Synthesized
AQVQKGLMMAQ

SEQ ID NO: 4389 - protein, 11 aa, Artificial Sequence
  Synthesized
AQVQNNTYGAQ

SEQ ID NO: 4390 - protein, 11 aa, Artificial Sequence
  Synthesized
AQVQQTRSNAQ

SEQ ID NO: 4391 - protein, 11 aa, Artificial Sequence
  Synthesized
AQVQRSNNVAQ

SEQ ID NO: 4392 - protein, 11 aa, Artificial Sequence
  Synthesized
AQVQSHSRVAQ

SEQ ID NO: 4393 - protein, 11 aa, Artificial Sequence
  Synthesized
AQVRAAPVGAQ

SEQ ID NO: 4394 - protein, 11 aa, Artificial Sequence
  Synthesized
AQVRLPRHKAQ

SEQ ID NO: 4395 - protein, 11 aa, Artificial Sequence
  Synthesized
AQVRMLNTDAQ

SEQ ID NO: 4396 - protein, 11 aa, Artificial Sequence
  Synthesized
AQVRNSSLNAQ

SEQ ID NO: 4397 - protein, 11 aa, Artificial Sequence
  Synthesized
AQVRPGNLSAQ

SEQ ID NO: 4398 - protein, 11 aa, Artificial Sequence
  Synthesized
AQVRQGGSIAQ

SEQ ID NO: 4399 - protein, 11 aa, Artificial Sequence
  Synthesized
AQVRRELSEAQ

SEQ ID NO: 4400 - protein, 11 aa, Artificial Sequence
  Synthesized
AQVRSDVRSAQ

SEQ ID NO: 4401 - protein, 11 aa, Artificial Sequence
  Synthesized
AQVRSNTPSAQ

SEQ ID NO: 4402 - protein, 11 aa, Artificial Sequence
  Synthesized
AQVRSVSSQAQ

SEQ ID NO: 4403 - protein, 11 aa, Artificial Sequence
  Synthesized
AQVRTLDANAQ

SEQ ID NO: 4404 - protein, 11 aa, Artificial Sequence
  Synthesized
AQVRTTNNMAQ

SEQ ID NO: 4405 - protein, 11 aa, Artificial Sequence
  Synthesized
AQVSAGAFKAQ

SEQ ID NO: 4406 - protein, 11 aa, Artificial Sequence
  Synthesized
AQVSGKSAMAQ

SEQ ID NO: 4407 - protein, 11 aa, Artificial Sequence
  Synthesized
AQVSGRGLAAQ

SEQ ID NO: 4408 - protein, 11 aa, Artificial Sequence
  Synthesized
AQVSGRSLSAQ

SEQ ID NO: 4409 - protein, 11 aa, Artificial Sequence
  Synthesized
AQVSHTKTSAQ

SEQ ID NO: 4410 - protein, 11 aa, Artificial Sequence
  Synthesized
AQVSIGATSAQ

SEQ ID NO: 4411 - protein, 11 aa, Artificial Sequence
  Synthesized
AQVSIGDHSAQ

SEQ ID NO: 4412 - protein, 11 aa, Artificial Sequence
  Synthesized
AQVSIGDQCAQ

SEQ ID NO: 4413 - protein, 11 aa, Artificial Sequence
  Synthesized
AQVSIGDQSAQ

SEQ ID NO: 4414 - protein, 11 aa, Artificial Sequence
  Synthesized
AQVSKGPALAQ

SEQ ID NO: 4415 - protein, 11 aa, Artificial Sequence
  Synthesized
AQVSKLANPAQ

SEQ ID NO: 4416 - protein, 11 aa, Artificial Sequence
  Synthesized
AQVSKTYNSAQ

SEQ ID NO: 4417 - protein, 11 aa, Artificial Sequence
  Synthesized
AQVSLKSQRAQ

SEQ ID NO: 4418 - protein, 11 aa, Artificial Sequence
  Synthesized
AQVSLPRLDAQ

SEQ ID NO: 4419 - protein, 11 aa, Artificial Sequence
  Synthesized
AQVSLSSVVAQ

SEQ ID NO: 4420 - protein, 11 aa, Artificial Sequence
  Synthesized
AQVSMKAYTAQ

SEQ ID NO: 4421 - protein, 11 aa, Artificial Sequence
  Synthesized
AQVSMKPLVAQ

SEQ ID NO: 4422 - protein, 11 aa, Artificial Sequence
  Synthesized
AQVSNGLRTAQ

SEQ ID NO: 4423 - protein, 11 aa, Artificial Sequence
  Synthesized
AQVSNKATQAQ

SEQ ID NO: 4424 - protein, 11 aa, Artificial Sequence
  Synthesized
AQVSPKSHQAQ

SEQ ID NO: 4425 - protein, 11 aa, Artificial Sequence
  Synthesized
AQVSPNNRNAQ

SEQ ID NO: 4426 - protein, 11 aa, Artificial Sequence
  Synthesized
AQVSQAGRGAQ

SEQ ID NO: 4427 - protein, 11 aa, Artificial Sequence
  Synthesized
AQVSQKPIVAQ

SEQ ID NO: 4428 - protein, 11 aa, Artificial Sequence
  Synthesized
AQVSQVAEVAQ

SEQ ID NO: 4429 - protein, 11 aa, Artificial Sequence
  Synthesized
AQVSRADHTAQ

SEQ ID NO: 4430 - protein, 11 aa, Artificial Sequence
  Synthesized
AQVSRDTQLAQ

SEQ ID NO: 4431 - protein, 11 aa, Artificial Sequence
  Synthesized
AQVSRQGALAQ

SEQ ID NO: 4432 - protein, 11 aa, Artificial Sequence
  Synthesized
AQVSRTNPPAQ

SEQ ID NO: 4433 - protein, 11 aa, Artificial Sequence
  Synthesized
AQVSSERTAAQ

SEQ ID NO: 4434 - protein, 11 aa, Artificial Sequence
  Synthesized
AQVSSQRLQAQ

SEQ ID NO: 4435 - protein, 11 aa, Artificial Sequence
  Synthesized
AQVSSSSRAAQ

SEQ ID NO: 4436 - protein, 11 aa, Artificial Sequence
  Synthesized
AQVSSSSRLAQ

SEQ ID NO: 4437 - protein, 11 aa, Artificial Sequence
  Synthesized
AQVSSSTHNAQ

SEQ ID NO: 4438 - protein, 11 aa, Artificial Sequence
  Synthesized
AQVSSTGMRAQ

SEQ ID NO: 4439 - protein, 11 aa, Artificial Sequence
  Synthesized
AQVSSVPLQAQ

SEQ ID NO: 4440 - protein, 11 aa, Artificial Sequence
  Synthesized
AQVSTKAVIAQ

SEQ ID NO: 4441 - protein, 11 aa, Artificial Sequence
  Synthesized
AQVSTNFRGAQ

SEQ ID NO: 4442 - protein, 11 aa, Artificial Sequence
  Synthesized
AQVSTSRGMAQ

SEQ ID NO: 4443 - protein, 11 aa, Artificial Sequence
  Synthesized
AQVSYSSLVAQ

SEQ ID NO: 4444 - protein, 11 aa, Artificial Sequence
  Synthesized
AQVSYTSFMAQ

SEQ ID NO: 4445 - protein, 11 aa, Artificial Sequence
  Synthesized
AQVTASRDRAQ

SEQ ID NO: 4446 - protein, 11 aa, Artificial Sequence
  Synthesized
AQVTASTDVAQ

SEQ ID NO: 4447 - protein, 11 aa, Artificial Sequence
  Synthesized
AQVTDSTLQAQ

SEQ ID NO: 4448 - protein, 11 aa, Artificial Sequence
  Synthesized
AQVTKHTSFAQ

SEQ ID NO: 4449 - protein, 11 aa, Artificial Sequence
  Synthesized
AQVTLPRHYAQ

SEQ ID NO: 4450 - protein, 11 aa, Artificial Sequence
  Synthesized
AQVTQATRDAQ

SEQ ID NO: 4451 - protein, 11 aa, Artificial Sequence
  Synthesized
AQVTRSDANAQ

SEQ ID NO: 4452 - protein, 11 aa, Artificial Sequence
  Synthesized
AQVTSPLQLAQ

SEQ ID NO: 4453 - protein, 11 aa, Artificial Sequence
  Synthesized
AQVTTAPESAQ

SEQ ID NO: 4454 - protein, 11 aa, Artificial Sequence
  Synthesized
AQVTTKTQLAQ

SEQ ID NO: 4455 - protein, 11 aa, Artificial Sequence
  Synthesized
AQVTTNLDSAQ

SEQ ID NO: 4456 - protein, 11 aa, Artificial Sequence
  Synthesized
AQVTTQNRVAQ

SEQ ID NO: 4457 - protein, 11 aa, Artificial Sequence
  Synthesized
AQVVASSSKAQ

SEQ ID NO: 4458 - protein, 11 aa, Artificial Sequence
  Synthesized
AQVVKSSIAAQ

SEQ ID NO: 4459 - protein, 11 aa, Artificial Sequence
  Synthesized
AQVVKSSPNAQ

SEQ ID NO: 4460 - protein, 11 aa, Artificial Sequence
  Synthesized
AQVVLPHYGAQ

SEQ ID NO: 4461 - protein, 11 aa, Artificial Sequence
  Synthesized
AQVVQKHLPAQ

SEQ ID NO: 4462 - protein, 11 aa, Artificial Sequence
  Synthesized
AQVVRKDAEAQ

SEQ ID NO: 4463 - protein, 11 aa, Artificial Sequence
  Synthesized
AQVVSISSKAQ

SEQ ID NO: 4464 - protein, 11 aa, Artificial Sequence
  Synthesized
AQVVSRTSSAQ

SEQ ID NO: 4465 - protein, 11 aa, Artificial Sequence
  Synthesized
AQVVTKSTMAQ

SEQ ID NO: 4466 - protein, 11 aa, Artificial Sequence
  Synthesized
AQVVTLSTSAQ

SEQ ID NO: 4467 - protein, 11 aa, Artificial Sequence
  Synthesized
AQVVVPERTAQ

SEQ ID NO: 4468 - protein, 11 aa, Artificial Sequence
  Synthesized
AQVWSTTTGAQ

SEQ ID NO: 4469 - protein, 11 aa, Artificial Sequence
  Synthesized
AQVYLPRKDAQ

SEQ ID NO: 4470 - protein, 11 aa, Artificial Sequence
  Synthesized
AQVYSGSSGAQ

SEQ ID NO: 4471 - protein, 11 aa, Artificial Sequence
  Synthesized
AQWAAAEKEAQ

SEQ ID NO: 4472 - protein, 11 aa, Artificial Sequence
  Synthesized
AQWANATGTAQ

SEQ ID NO: 4473 - protein, 11 aa, Artificial Sequence
  Synthesized
AQWDSLQTAAQ

SEQ ID NO: 4474 - protein, 11 aa, Artificial Sequence
  Synthesized
AQWFYHQTHAQ

SEQ ID NO: 4475 - protein, 11 aa, Artificial Sequence
  Synthesized
AQWGLVDKDAQ

SEQ ID NO: 4476 - protein, 11 aa, Artificial Sequence
  Synthesized
AQWIAKESDAQ

SEQ ID NO: 4477 - protein, 11 aa, Artificial Sequence
  Synthesized
AQWKAKESDAQ

SEQ ID NO: 4478 - protein, 11 aa, Artificial Sequence
  Synthesized
AQWKSLQTAAQ

SEQ ID NO: 4479 - protein, 11 aa, Artificial Sequence
  Synthesized
AQWKTLTGEAQ

SEQ ID NO: 4480 - protein, 11 aa, Artificial Sequence
  Synthesized
AQWMAKESYAQ

SEQ ID NO: 4481 - protein, 11 aa, Artificial Sequence
  Synthesized
AQWMAKETDAQ

SEQ ID NO: 4482 - protein, 11 aa, Artificial Sequence
  Synthesized
AQWMAKEYDAQ

SEQ ID NO: 4483 - protein, 11 aa, Artificial Sequence
  Synthesized
AQWMANESDAQ

SEQ ID NO: 4484 - protein, 11 aa, Artificial Sequence
  Synthesized
AQWMTGRDSAQ

SEQ ID NO: 4485 - protein, 11 aa, Artificial Sequence
  Synthesized
AQWNLLQTAAQ

SEQ ID NO: 4486 - protein, 11 aa, Artificial Sequence
  Synthesized
AQWNSLKTAAQ

SEQ ID NO: 4487 - protein, 11 aa, Artificial Sequence
  Synthesized
AQWNSLQNAAQ

SEQ ID NO: 4488 - protein, 11 aa, Artificial Sequence
  Synthesized
AQWNSLQTDAQ

SEQ ID NO: 4489 - protein, 11 aa, Artificial Sequence
  Synthesized
AQWNSLQTSAQ

SEQ ID NO: 4490 - protein, 11 aa, Artificial Sequence
  Synthesized
AQWPKQLPQAQ

SEQ ID NO: 4491 - protein, 11 aa, Artificial Sequence
  Synthesized
AQWPTLPRDAQ

SEQ ID NO: 4492 - protein, 11 aa, Artificial Sequence
  Synthesized
AQWQDQPRKAQ

SEQ ID NO: 4493 - protein, 11 aa, Artificial Sequence
  Synthesized
AQWRSDGGNAQ

SEQ ID NO: 4494 - protein, 11 aa, Artificial Sequence
  Synthesized
AQWSQAMNAAQ

SEQ ID NO: 4495 - protein, 11 aa, Artificial Sequence
  Synthesized
AQWSTAHAVAQ

SEQ ID NO: 4496 - protein, 11 aa, Artificial Sequence
  Synthesized
AQWSTSMEPAQ

SEQ ID NO: 4497 - protein, 11 aa, Artificial Sequence
  Synthesized
AQWTKSSPNAQ

SEQ ID NO: 4498 - protein, 11 aa, Artificial Sequence
  Synthesized
AQWTPSGRNAQ

SEQ ID NO: 4499 - protein, 11 aa, Artificial Sequence
  Synthesized
AQYAASPLTAQ

SEQ ID NO: 4500 - protein, 11 aa, Artificial Sequence
  Synthesized
AQYAGHSFMAQ

SEQ ID NO: 4501 - protein, 11 aa, Artificial Sequence
  Synthesized
AQYAKAELNAQ

SEQ ID NO: 4502 - protein, 11 aa, Artificial Sequence
  Synthesized
AQYAKHPQSAQ

SEQ ID NO: 4503 - protein, 11 aa, Artificial Sequence
  Synthesized
AQYAKSGDRAQ

SEQ ID NO: 4504 - protein, 11 aa, Artificial Sequence
  Synthesized
AQYANATRLAQ

SEQ ID NO: 4505 - protein, 11 aa, Artificial Sequence
  Synthesized
AQYASFSFMAQ

SEQ ID NO: 4506 - protein, 11 aa, Artificial Sequence
  Synthesized
AQYASSTRNAQ

SEQ ID NO: 4507 - protein, 11 aa, Artificial Sequence
  Synthesized
AQYATLSPDAQ

SEQ ID NO: 4508 - protein, 11 aa, Artificial Sequence
  Synthesized
AQYDKASGRAQ

SEQ ID NO: 4509 - protein, 11 aa, Artificial Sequence
  Synthesized
AQYDLPMKHAQ

SEQ ID NO: 4510 - protein, 11 aa, Artificial Sequence
  Synthesized
AQYDRGVVQAQ

SEQ ID NO: 4511 - protein, 11 aa, Artificial Sequence
  Synthesized
AQYDRSYKSAQ

SEQ ID NO: 4512 - protein, 11 aa, Artificial Sequence
  Synthesized
AQYELPRGYAQ

SEQ ID NO: 4513 - protein, 11 aa, Artificial Sequence
  Synthesized
AQYETRSANAQ

SEQ ID NO: 4514 - protein, 11 aa, Artificial Sequence
  Synthesized
AQYFLPRGGAQ

SEQ ID NO: 4515 - protein, 11 aa, Artificial Sequence
  Synthesized
AQYFPDSFMAQ

SEQ ID NO: 4516 - protein, 11 aa, Artificial Sequence
  Synthesized
AQYGALTSSAQ

SEQ ID NO: 4517 - protein, 11 aa, Artificial Sequence
  Synthesized
AQYGGTPKPAQ

SEQ ID NO: 4518 - protein, 11 aa, Artificial Sequence
  Synthesized
AQYGHLSAMAQ

SEQ ID NO: 4519 - protein, 11 aa, Artificial Sequence
  Synthesized
AQYGLPAMGAQ

SEQ ID NO: 4520 - protein, 11 aa, Artificial Sequence
  Synthesized
AQYGLPDKKAQ

SEQ ID NO: 4521 - protein, 11 aa, Artificial Sequence
  Synthesized
AQYGLPREEAQ

SEQ ID NO: 4522 - protein, 11 aa, Artificial Sequence
  Synthesized
AQYGLPSAFAQ

SEQ ID NO: 4523 - protein, 11 aa, Artificial Sequence
  Synthesized
AQYGLTRQPAQ

SEQ ID NO: 4524 - protein, 11 aa, Artificial Sequence
  Synthesized
AQYGPGNLLAQ

SEQ ID NO: 4525 - protein, 11 aa, Artificial Sequence
  Synthesized
AQYGPSTLRAQ

SEQ ID NO: 4526 - protein, 11 aa, Artificial Sequence
  Synthesized
AQYGPTLGMAQ

SEQ ID NO: 4527 - protein, 11 aa, Artificial Sequence
  Synthesized
AQYGSQRMTAQ

SEQ ID NO: 4528 - protein, 11 aa, Artificial Sequence
  Synthesized
AQYGSTRLQAQ

SEQ ID NO: 4529 - protein, 11 aa, Artificial Sequence
  Synthesized
AQYGTAMRDAQ

SEQ ID NO: 4530 - protein, 11 aa, Artificial Sequence
  Synthesized
AQYGVHSAMAQ

SEQ ID NO: 4531 - protein, 11 aa, Artificial Sequence
  Synthesized
AQYGVNSFMAQ

SEQ ID NO: 4532 - protein, 11 aa, Artificial Sequence
  Synthesized
AQYHIRSAMAQ

SEQ ID NO: 4533 - protein, 11 aa, Artificial Sequence
  Synthesized
AQYHLPDPSAQ

SEQ ID NO: 4534 - protein, 11 aa, Artificial Sequence
  Synthesized
AQYHLPHDFAQ

SEQ ID NO: 4535 - protein, 11 aa, Artificial Sequence
  Synthesized
AQYHLPRFPAQ

SEQ ID NO: 4536 - protein, 11 aa, Artificial Sequence
  Synthesized
AQYHLPRPHAQ

SEQ ID NO: 4537 - protein, 11 aa, Artificial Sequence
  Synthesized
AQYHQISAMAQ

SEQ ID NO: 4538 - protein, 11 aa, Artificial Sequence
  Synthesized
AQYHSMSFMAQ

SEQ ID NO: 4539 - protein, 11 aa, Artificial Sequence
  Synthesized
AQYHTLTRQAQ

SEQ ID NO: 4540 - protein, 11 aa, Artificial Sequence
  Synthesized
AQYISGRQVAQ

SEQ ID NO: 4541 - protein, 11 aa, Artificial Sequence
  Synthesized
AQYKGGSAMAQ

SEQ ID NO: 4542 - protein, 11 aa, Artificial Sequence
  Synthesized
AQYKGISAMAQ

SEQ ID NO: 4543 - protein, 11 aa, Artificial Sequence
  Synthesized
AQYKMSESKAQ

SEQ ID NO: 4544 - protein, 11 aa, Artificial Sequence
  Synthesized
AQYKNLHTNAQ

SEQ ID NO: 4545 - protein, 11 aa, Artificial Sequence
  Synthesized
AQYKNYGSSAQ

SEQ ID NO: 4546 - protein, 11 aa, Artificial Sequence
  Synthesized
AQYKTSSQSAQ

SEQ ID NO: 4547 - protein, 11 aa, Artificial Sequence
  Synthesized
AQYLASSDSAQ

SEQ ID NO: 4548 - protein, 11 aa, Artificial Sequence
  Synthesized
AQYLGGSNYAQ

SEQ ID NO: 4549 - protein, 11 aa, Artificial Sequence
  Synthesized
AQYLLNHDVAQ

SEQ ID NO: 4550 - protein, 11 aa, Artificial Sequence
  Synthesized
AQYLLPEDHAQ

SEQ ID NO: 4551 - protein, 11 aa, Artificial Sequence
  Synthesized
AQYLPTSAMAQ

SEQ ID NO: 4552 - protein, 11 aa, Artificial Sequence
  Synthesized
AQYLSSKAAAQ

SEQ ID NO: 4553 - protein, 11 aa, Artificial Sequence
  Synthesized
AQYLTDALNAQ

SEQ ID NO: 4554 - protein, 11 aa, Artificial Sequence
  Synthesized
AQYLTGMANAQ

SEQ ID NO: 4555 - protein, 11 aa, Artificial Sequence
  Synthesized
AQYLTKSLDAQ

SEQ ID NO: 4556 - protein, 11 aa, Artificial Sequence
  Synthesized
AQYLYSSFMAQ

SEQ ID NO: 4557 - protein, 11 aa, Artificial Sequence
  Synthesized
AQYMLPRDIAQ

SEQ ID NO: 4558 - protein, 11 aa, Artificial Sequence
  Synthesized
AQYNGTRKPAQ

SEQ ID NO: 4559 - protein, 11 aa, Artificial Sequence
  Synthesized
AQYNHTRDFAQ

SEQ ID NO: 4560 - protein, 11 aa, Artificial Sequence
  Synthesized
AQYNHTRYSAQ

SEQ ID NO: 4561 - protein, 11 aa, Artificial Sequence
  Synthesized
AQYNLPRRDAQ

SEQ ID NO: 4562 - protein, 11 aa, Artificial Sequence
  Synthesized
AQYNNTAYFAQ

SEQ ID NO: 4563 - protein, 11 aa, Artificial Sequence
  Synthesized
AQYNNTDGRAQ

SEQ ID NO: 4564 - protein, 11 aa, Artificial Sequence
  Synthesized
AQYNNTFGRAQ

SEQ ID NO: 4565 - protein, 11 aa, Artificial Sequence
  Synthesized
AQYNNTGFFAQ

SEQ ID NO: 4566 - protein, 11 aa, Artificial Sequence
  Synthesized
AQYNNTKHRAQ

SEQ ID NO: 4567 - protein, 11 aa, Artificial Sequence
  Synthesized
AQYNNTKYRAQ

SEQ ID NO: 4568 - protein, 11 aa, Artificial Sequence
  Synthesized
AQYNNTMFGAQ

SEQ ID NO: 4569 - protein, 11 aa, Artificial Sequence
  Synthesized
AQYNNTMFHAQ

SEQ ID NO: 4570 - protein, 11 aa, Artificial Sequence
  Synthesized
AQYNNTNPEAQ

SEQ ID NO: 4571 - protein, 11 aa, Artificial Sequence
  Synthesized
AQYNNTPAHAQ

SEQ ID NO: 4572 - protein, 11 aa, Artificial Sequence
  Synthesized
AQYNNTPGSAQ

SEQ ID NO: 4573 - protein, 11 aa, Artificial Sequence
  Synthesized
AQYNNTRHGAQ

SEQ ID NO: 4574 - protein, 11 aa, Artificial Sequence
  Synthesized
AQYNNTRHPAQ

SEQ ID NO: 4575 - protein, 11 aa, Artificial Sequence
  Synthesized
AQYNNTRKAAQ

SEQ ID NO: 4576 - protein, 11 aa, Artificial Sequence
  Synthesized
AQYNNTTFAAQ

SEQ ID NO: 4577 - protein, 11 aa, Artificial Sequence
  Synthesized
AQYNNTTPVAQ

SEQ ID NO: 4578 - protein, 11 aa, Artificial Sequence
  Synthesized
AQYNNTVIPAQ

SEQ ID NO: 4579 - protein, 11 aa, Artificial Sequence
  Synthesized
AQYNPGRGSAQ

SEQ ID NO: 4580 - protein, 11 aa, Artificial Sequence
  Synthesized
AQYNPPTNSAQ

SEQ ID NO: 4581 - protein, 11 aa, Artificial Sequence
  Synthesized
AQYNPTRFHAQ

SEQ ID NO: 4582 - protein, 11 aa, Artificial Sequence
  Synthesized
AQYNPVDRSAQ

SEQ ID NO: 4583 - protein, 11 aa, Artificial Sequence
  Synthesized
AQYNPVFRSAQ

SEQ ID NO: 4584 - protein, 11 aa, Artificial Sequence
  Synthesized
AQYNPVKRSAQ

SEQ ID NO: 4585 - protein, 11 aa, Artificial Sequence
  Synthesized
AQYNPVPRSAQ

SEQ ID NO: 4586 - protein, 11 aa, Artificial Sequence
  Synthesized
AQYNPVRRSAQ

SEQ ID NO: 4587 - protein, 11 aa, Artificial Sequence
  Synthesized
AQYNPVVRSAQ

SEQ ID NO: 4588 - protein, 11 aa, Artificial Sequence
  Synthesized
AQYNQKVYSAQ

SEQ ID NO: 4589 - protein, 11 aa, Artificial Sequence
  Synthesized
AQYNQTRYRAQ

SEQ ID NO: 4590 - protein, 11 aa, Artificial Sequence
  Synthesized
AQYNRTRGPAQ

SEQ ID NO: 4591 - protein, 11 aa, Artificial Sequence
  Synthesized
AQYNSLSSNAQ

SEQ ID NO: 4592 - protein, 11 aa, Artificial Sequence
  Synthesized
AQYNSLSTHAQ

SEQ ID NO: 4593 - protein, 11 aa, Artificial Sequence
  Synthesized
AQYNVTRAPAQ

SEQ ID NO: 4594 - protein, 11 aa, Artificial Sequence
  Synthesized
AQYNYTRHLAQ

SEQ ID NO: 4595 - protein, 11 aa, Artificial Sequence
  Synthesized
AQYNYTRKTAQ

SEQ ID NO: 4596 - protein, 11 aa, Artificial Sequence
  Synthesized
AQYNYTRRHAQ

SEQ ID NO: 4597 - protein, 11 aa, Artificial Sequence
  Synthesized
AQYNYTRSFAQ

SEQ ID NO: 4598 - protein, 11 aa, Artificial Sequence
  Synthesized
AQYPAKALSAQ

SEQ ID NO: 4599 - protein, 11 aa, Artificial Sequence
  Synthesized
AQYPASGAAAQ

SEQ ID NO: 4600 - protein, 11 aa, Artificial Sequence
  Synthesized
AQYPGGNVTAQ

SEQ ID NO: 4601 - protein, 11 aa, Artificial Sequence
  Synthesized
AQYPHVSAMAQ

SEQ ID NO: 4602 - protein, 11 aa, Artificial Sequence
  Synthesized
AQYPHYSAMAQ

SEQ ID NO: 4603 - protein, 11 aa, Artificial Sequence
  Synthesized
AQYPLPHNHAQ

SEQ ID NO: 4604 - protein, 11 aa, Artificial Sequence
  Synthesized
AQYPLPRINAQ

SEQ ID NO: 4605 - protein, 11 aa, Artificial Sequence
  Synthesized
AQYPNENLKAQ

SEQ ID NO: 4606 - protein, 11 aa, Artificial Sequence
  Synthesized
AQYPNSDQRAQ

SEQ ID NO: 4607 - protein, 11 aa, Artificial Sequence
  Synthesized
AQYPQERVDAQ

SEQ ID NO: 4608 - protein, 11 aa, Artificial Sequence
  Synthesized
AQYPQSHDRAQ

SEQ ID NO: 4609 - protein, 11 aa, Artificial Sequence
  Synthesized
AQYPREKSVAQ

SEQ ID NO: 4610 - protein, 11 aa, Artificial Sequence
  Synthesized
AQYPRNSGDAQ

SEQ ID NO: 4611 - protein, 11 aa, Artificial Sequence
  Synthesized
AQYPTNRISAQ

SEQ ID NO: 4612 - protein, 11 aa, Artificial Sequence
  Synthesized
AQYPYKTTSAQ

SEQ ID NO: 4613 - protein, 11 aa, Artificial Sequence
  Synthesized
AQYPYMSAMAQ

SEQ ID NO: 4614 - protein, 11 aa, Artificial Sequence
  Synthesized
AQYQAVSQHAQ

SEQ ID NO: 4615 - protein, 11 aa, Artificial Sequence
  Synthesized
AQYQKLAGMAQ

SEQ ID NO: 4616 - protein, 11 aa, Artificial Sequence
  Synthesized
AQYQLRNPSAQ

SEQ ID NO: 4617 - protein, 11 aa, Artificial Sequence
  Synthesized
AQYQRSNTDAQ

SEQ ID NO: 4618 - protein, 11 aa, Artificial Sequence
  Synthesized
AQYRFGSAMAQ

SEQ ID NO: 4619 - protein, 11 aa, Artificial Sequence
  Synthesized
AQYRLPRFPAQ

SEQ ID NO: 4620 - protein, 11 aa, Artificial Sequence
  Synthesized
AQYRLPRMKAQ

SEQ ID NO: 4621 - protein, 11 aa, Artificial Sequence
  Synthesized
AQYRNTQTSAQ

SEQ ID NO: 4622 - protein, 11 aa, Artificial Sequence
  Synthesized
AQYRQLSAMAQ

SEQ ID NO: 4623 - protein, 11 aa, Artificial Sequence
  Synthesized
AQYRQNRVEAQ

SEQ ID NO: 4624 - protein, 11 aa, Artificial Sequence
  Synthesized
AQYRQSSVNAQ

SEQ ID NO: 4625 - protein, 11 aa, Artificial Sequence
  Synthesized
AQYRSGSFMAQ

SEQ ID NO: 4626 - protein, 11 aa, Artificial Sequence
  Synthesized
AQYRTAGPAAQ

SEQ ID NO: 4627 - protein, 11 aa, Artificial Sequence
  Synthesized
AQYRYFSAMAQ

SEQ ID NO: 4628 - protein, 11 aa, Artificial Sequence
  Synthesized
AQYSAELALAQ

SEQ ID NO: 4629 - protein, 11 aa, Artificial Sequence
  Synthesized
AQYSGQLSQAQ

SEQ ID NO: 4630 - protein, 11 aa, Artificial Sequence
  Synthesized
AQYSLPGHDAQ

SEQ ID NO: 4631 - protein, 11 aa, Artificial Sequence
  Synthesized
AQYSNFSFMAQ

SEQ ID NO: 4632 - protein, 11 aa, Artificial Sequence
  Synthesized
AQYSPGLHQAQ

SEQ ID NO: 4633 - protein, 11 aa, Artificial Sequence
  Synthesized
AQYSPSGVRAQ

SEQ ID NO: 4634 - protein, 11 aa, Artificial Sequence
  Synthesized
AQYSQNLRQAQ

SEQ ID NO: 4635 - protein, 11 aa, Artificial Sequence
  Synthesized
AQYSRTDATAQ

SEQ ID NO: 4636 - protein, 11 aa, Artificial Sequence
  Synthesized
AQYSSAGSNAQ

SEQ ID NO: 4637 - protein, 11 aa, Artificial Sequence
  Synthesized
AQYSSGKATAQ

SEQ ID NO: 4638 - protein, 11 aa, Artificial Sequence
  Synthesized
AQYSTGLIKAQ

SEQ ID NO: 4639 - protein, 11 aa, Artificial Sequence
  Synthesized
AQYSVGRPDAQ

SEQ ID NO: 4640 - protein, 11 aa, Artificial Sequence
  Synthesized
AQYSVNKSPAQ

SEQ ID NO: 4641 - protein, 11 aa, Artificial Sequence
  Synthesized
AQYTGRTMIAQ

SEQ ID NO: 4642 - protein, 11 aa, Artificial Sequence
  Synthesized
AQYTGSRLNAQ

SEQ ID NO: 4643 - protein, 11 aa, Artificial Sequence
  Synthesized
AQYTHANPEAQ

SEQ ID NO: 4644 - protein, 11 aa, Artificial Sequence
  Synthesized
AQYTHSTKTAQ

SEQ ID NO: 4645 - protein, 11 aa, Artificial Sequence
  Synthesized
AQYTINGTPAQ

SEQ ID NO: 4646 - protein, 11 aa, Artificial Sequence
  Synthesized
AQYTLPRFHAQ

SEQ ID NO: 4647 - protein, 11 aa, Artificial Sequence
  Synthesized
AQYTLPRKKAQ

SEQ ID NO: 4648 - protein, 11 aa, Artificial Sequence
  Synthesized
AQYTSTLKAAQ

SEQ ID NO: 4649 - protein, 11 aa, Artificial Sequence
  Synthesized
AQYTSYLSNAQ

SEQ ID NO: 4650 - protein, 11 aa, Artificial Sequence
  Synthesized
AQYTTGPKSAQ

SEQ ID NO: 4651 - protein, 11 aa, Artificial Sequence
  Synthesized
AQYVANPKLAQ

SEQ ID NO: 4652 - protein, 11 aa, Artificial Sequence
  Synthesized
AQYVGKNMSAQ

SEQ ID NO: 4653 - protein, 11 aa, Artificial Sequence
  Synthesized
AQYVHSVRAAQ

SEQ ID NO: 4654 - protein, 11 aa, Artificial Sequence
  Synthesized
AQYVLPHGEAQ

SEQ ID NO: 4655 - protein, 11 aa, Artificial Sequence
  Synthesized
AQYVNGSFMAQ

SEQ ID NO: 4656 - protein, 11 aa, Artificial Sequence
  Synthesized
AQYVSKSAMAQ

SEQ ID NO: 4657 - protein, 11 aa, Artificial Sequence
  Synthesized
AQYVVGSFMAQ

SEQ ID NO: 4658 - protein, 11 aa, Artificial Sequence
  Synthesized
AQYYETSAMAQ

SEQ ID NO: 4659 - protein, 11 aa, Artificial Sequence
  Synthesized
AQYYLPRNKAQ

SEQ ID NO: 4660 - protein, 11 aa, Artificial Sequence
  Synthesized
DQIGRTTMPAQ

SEQ ID NO: 4661 - protein, 11 aa, Artificial Sequence
  Synthesized
DQRASTMSQAQ

SEQ ID NO: 4662 - protein, 11 aa, Artificial Sequence
  Synthesized
DQRSSLQNQAQ

SEQ ID NO: 4663 - protein, 11 aa, Artificial Sequence
  Synthesized
DQTPRVQPDAQ

SEQ ID NO: 4664 - protein, 11 aa, Artificial Sequence
  Synthesized
DQTQSNIGRAQ

SEQ ID NO: 4665 - protein, 11 aa, Artificial Sequence
  Synthesized
DQTRASALSAQ

SEQ ID NO: 4666 - protein, 11 aa, Artificial Sequence
  Synthesized
DQTVLGTNMAQ

SEQ ID NO: 4667 - DNA, 33 bp, Artificial Sequence
  Synthesized
gctcaggctgctttttcttctgagcgtgctcag

SEQ ID NO: 4668 - DNA, 33 bp, Artificial Sequence
  Synthesized
gctcaggctgctcattcttctgctatggctcag

SEQ ID NO: 4669 - DNA, 33 bp, Artificial Sequence
  Synthesized
gctcaggctgctattcgtaatcctactgctcag

SEQ ID NO: 4670 - DNA, 33 bp, Artificial Sequence
  Synthesized
gctcaggctgctttgcctcgtaagcgtgctcag

SEQ ID NO: 4671 - DNA, 33 bp, Artificial Sequence
  Synthesized
gctcaggctgctcctcgtgctgttactgctcag

SEQ ID NO: 4672 - DNA, 33 bp, Artificial Sequence
  Synthesized
gctcaggctgctccttctcgtatggctgctcag

SEQ ID NO: 4673 - DNA, 33 bp, Artificial Sequence
  Synthesized
gctcaggctgcttctaagtctgttttggctcag

SEQ ID NO: 4674 - DNA, 33 bp, Artificial Sequence
  Synthesized
gctcaggctgcttctaagactggtttggctcag

SEQ ID NO: 4675 - DNA, 33 bp, Artificial Sequence
  Synthesized
gctcaggctgctactggttctattcgtgctcag

SEQ ID NO: 4676 - DNA, 33 bp, Artificial Sequence
  Synthesized
gctcaggctgctactaagttgaatatggctcag

SEQ ID NO: 4677 - DNA, 33 bp, Artificial Sequence
  Synthesized
gctcaggctgcttatcgtgatcagactgctcag

SEQ ID NO: 4678 - DNA, 33 bp, Artificial Sequence
  Synthesized
gctcaggctgatgctcgttctaaggttgctcag

SEQ ID NO: 4679 - DNA, 33 bp, Artificial Sequence
  Synthesized
gctcaggctgatgcttctcgtttgcctgctcag

SEQ ID NO: 4680 - DNA, 33 bp, Artificial Sequence
  Synthesized
gctcaggctgattttccttcttttatggctcag

SEQ ID NO: 4681 - DNA, 33 bp, Artificial Sequence
  Synthesized
gctcaggctgatggttctcagttgcgtgctcag

SEQ ID NO: 4682 - DNA, 33 bp, Artificial Sequence
  Synthesized
gctcaggctgatcattattcttttatggctcag

SEQ ID NO: 4683 - DNA, 33 bp, Artificial Sequence
  Synthesized
gctcaggctgatattcatacttttcaggctcag

SEQ ID NO: 4684 - DNA, 33 bp, Artificial Sequence
  Synthesized
gctcaggctgatcgtttgaagttgtctgctcag

SEQ ID NO: 4685 - DNA, 33 bp, Artificial Sequence
  Synthesized
gctcaggctgagggttttgctatgcatgctcag

SEQ ID NO: 4686 - DNA, 33 bp, Artificial Sequence
  Synthesized
gctcaggctgagggtactaagttgcgtgctcag

SEQ ID NO: 4687 - DNA, 33 bp, Artificial Sequence
  Synthesized
gctcaggctgagaagttgcagcatcctgctcag

SEQ ID NO: 4688 - DNA, 33 bp, Artificial Sequence
  Synthesized
gctcaggctgagatgcatactaagactgctcag

SEQ ID NO: 4689 - DNA, 33 bp, Artificial Sequence
  Synthesized
gctcaggctgagcgtatgcataatcaggctcag

SEQ ID NO: 4690 - DNA, 33 bp, Artificial Sequence
  Synthesized
gctcaggcttttaagttggagtctgctgctcag

SEQ ID NO: 4691 - DNA, 33 bp, Artificial Sequence
  Synthesized
gctcaggcttttaagtattctgctatggctcag

SEQ ID NO: 4692 - DNA, 33 bp, Artificial Sequence
  Synthesized
gctcaggcttttttgcctcgtattcatgctcag

SEQ ID NO: 4693 - DNA, 33 bp, Artificial Sequence
  Synthesized
gctcaggctggtgctaagacttttcatgctcag

SEQ ID NO: 4694 - DNA, 33 bp, Artificial Sequence
  Synthesized
gctcaggctggttttcattctgctatggctcag

SEQ ID NO: 4695 - DNA, 33 bp, Artificial Sequence
  Synthesized
gctcaggctggtggtcattctgctatggctcag

SEQ ID NO: 4696 - DNA, 33 bp, Artificial Sequence
  Synthesized
gctcaggctggtggtaagttggctaatgctcag

SEQ ID NO: 4697 - DNA, 33 bp, Artificial Sequence
  Synthesized
gctcaggctggtggtaagaatgttaatgctcag

SEQ ID NO: 4698 - DNA, 33 bp, Artificial Sequence
  Synthesized
gctcaggctggtggttctcctactattgctcag

SEQ ID NO: 4699 - DNA, 33 bp, Artificial Sequence
  Synthesized
gctcaggctggtcatttgtctgctatggctcag

SEQ ID NO: 4700 - DNA, 33 bp, Artificial Sequence
  Synthesized
gctcaggctggtcattctccttctattgctcag

SEQ ID NO: 4701 - DNA, 33 bp, Artificial Sequence
  Synthesized
gctcaggctggtattcgttctatgtctgctcag

SEQ ID NO: 4702 - DNA, 33 bp, Artificial Sequence
  Synthesized
gctcaggctggtaaggcttcttttatggctcag

SEQ ID NO: 4703 - DNA, 33 bp, Artificial Sequence
  Synthesized
gctcaggctggtaagtttgatcctttggctcag

SEQ ID NO: 4704 - DNA, 33 bp, Artificial Sequence
  Synthesized
gctcaggctggtaagttttcttttatggctcag

SEQ ID NO: 4705 - DNA, 33 bp, Artificial Sequence
  Synthesized
gctcaggctggtaagttgcagtctttggctcag

SEQ ID NO: 4706 - DNA, 33 bp, Artificial Sequence
  Synthesized
gctcaggctggtaagtcttctttggttgctcag

SEQ ID NO: 4707 - DNA, 33 bp, Artificial Sequence
  Synthesized
gctcaggctggtttgaagacttctcctgctcag

SEQ ID NO: 4708 - DNA, 33 bp, Artificial Sequence
  Synthesized
gctcaggctggtttgcctggtatgtttgctcag

SEQ ID NO: 4709 - DNA, 33 bp, Artificial Sequence
  Synthesized
gctcaggctggtttgcctcatcatcatgctcag

SEQ ID NO: 4710 - DNA, 33 bp, Artificial Sequence
  Synthesized
gctcaggctggtttgcctcgtcatactgctcag

SEQ ID NO: 4711 - DNA, 33 bp, Artificial Sequence
  Synthesized
gctcaggctggtttgcctcgttatcatgctcag

SEQ ID NO: 4712 - DNA, 33 bp, Artificial Sequence
  Synthesized
gctcaggctggtttgcagcctcgtggtgctcag

SEQ ID NO: 4713 - DNA, 33 bp, Artificial Sequence
  Synthesized
gctcaggctggtttgcgtttgactgttgctcag

SEQ ID NO: 4714 - DNA, 33 bp, Artificial Sequence
  Synthesized
gctcaggctggtcctattggtaatcgtgctcag

SEQ ID NO: 4715 - DNA, 33 bp, Artificial Sequence
  Synthesized
gctcaggctggtcagttgactcgtactgctcag

SEQ ID NO: 4716 - DNA, 33 bp, Artificial Sequence
  Synthesized
gctcaggctggtcagcctaatcatcgtgctcag

SEQ ID NO: 4717 - DNA, 33 bp, Artificial Sequence
  Synthesized
gctcaggctggtcgtactgctatgtctgctcag

SEQ ID NO: 4718 - DNA, 33 bp, Artificial Sequence
  Synthesized
gctcaggctggttctttttcttttatggctcag

SEQ ID NO: 4719 - DNA, 33 bp, Artificial Sequence
  Synthesized
gctcaggctggttctattggtaagtctgctcag

SEQ ID NO: 4720 - DNA, 33 bp, Artificial Sequence
  Synthesized
gctcaggctggttctgttttgacttctgctcag

SEQ ID NO: 4721 - DNA, 33 bp, Artificial Sequence
  Synthesized
gctcaggctggttctgttgtttctatggctcag

SEQ ID NO: 4722 - DNA, 33 bp, Artificial Sequence
  Synthesized
gctcaggctggtactgttgttcgtgaggctcag

SEQ ID NO: 4723 - DNA, 33 bp, Artificial Sequence
  Synthesized
gctcaggctcatgctgctcgtgagactgctcag

SEQ ID NO: 4724 - DNA, 33 bp, Artificial Sequence
  Synthesized
gctcaggctcatgctgatactcgtgttgctcag

SEQ ID NO: 4725 - DNA, 33 bp, Artificial Sequence
  Synthesized
gctcaggctcatggtacttctgctatggctcag

SEQ ID NO: 4726 - DNA, 33 bp, Artificial Sequence
  Synthesized
gctcaggctattaagaatcatcagttggctcag

SEQ ID NO: 4727 - DNA, 33 bp, Artificial Sequence
  Synthesized
gctcaggctattttgggtacttctgctgctcag

SEQ ID NO: 4728 - DNA, 33 bp, Artificial Sequence
  Synthesized
gctcaggctattaatggttctgctatggctcag

SEQ ID NO: 4729 - DNA, 33 bp, Artificial Sequence
  Synthesized
gctcaggctattcagtctcatcatattgctcag

SEQ ID NO: 4730 - DNA, 33 bp, Artificial Sequence
  Synthesized
gctcaggctattcgtgatactaatgctgctcag

SEQ ID NO: 4731 - DNA, 33 bp, Artificial Sequence
  Synthesized
gctcaggctattcgtcctggtggtattgctcag

SEQ ID NO: 4732 - DNA, 33 bp, Artificial Sequence
  Synthesized
gctcaggctatttctccttctgctatggctcag

SEQ ID NO: 4733 - DNA, 33 bp, Artificial Sequence
  Synthesized
gctcaggctattgtttctggttctactgctcag

SEQ ID NO: 4734 - DNA, 33 bp, Artificial Sequence
  Synthesized
gctcaggctaaggatgttcatcattctgctcag

SEQ ID NO: 4735 - DNA, 33 bp, Artificial Sequence
  Synthesized
gctcaggctaaggagaatattcatactgctcag

SEQ ID NO: 4736 - DNA, 33 bp, Artificial Sequence
  Synthesized
gctcaggctaagttgcctcgtggtgttgctcag

SEQ ID NO: 4737 - DNA, 33 bp, Artificial Sequence
  Synthesized
gctcaggctaagttgccttatatggaggctcag

SEQ ID NO: 4738 - DNA, 33 bp, Artificial Sequence
  Synthesized
gctcaggctaagcctgcttctaattttgctcag

SEQ ID NO: 4739 - DNA, 33 bp, Artificial Sequence
  Synthesized
gctcaggctaagcagcataatactactgctcag

SEQ ID NO: 4740 - DNA, 33 bp, Artificial Sequence
  Synthesized
gctcaggctaagtctcgtactgagatggctcag

SEQ ID NO: 4741 - DNA, 33 bp, Artificial Sequence
  Synthesized
gctcaggctaagtctgttaatttgtctgctcag

SEQ ID NO: 4742 - DNA, 33 bp, Artificial Sequence
  Synthesized
gctcaggctaagactgagggttattttgctcag

SEQ ID NO: 4743 - DNA, 33 bp, Artificial Sequence
  Synthesized
gctcaggctaagactttgaatactttggctcag

SEQ ID NO: 4744 - DNA, 33 bp, Artificial Sequence
  Synthesized
gctcaggctaagactcgttctaatgatgctcag

SEQ ID NO: 4745 - DNA, 33 bp, Artificial Sequence
  Synthesized
gctcaggctaaggttattcagcattctgctcag

SEQ ID NO: 4746 - DNA, 33 bp, Artificial Sequence
  Synthesized
gctcaggctaaggttatgaatcctcatgctcag

SEQ ID NO: 4747 - DNA, 33 bp, Artificial Sequence
  Synthesized
gctcaggctttggctaagaatcagaatgctcag

SEQ ID NO: 4748 - DNA, 33 bp, Artificial Sequence
  Synthesized
gctcaggctttgggtcgtcagttgggtgctcag

SEQ ID NO: 4749 - DNA, 33 bp, Artificial Sequence
  Synthesized
gctcaggctttgattaagacttcttctgctcag

SEQ ID NO: 4750 - DNA, 33 bp, Artificial Sequence
  Synthesized
gctcaggctttgaaggagtctcatcctgctcag

SEQ ID NO: 4751 - DNA, 33 bp, Artificial Sequence
  Synthesized
gctcaggctttgaagtctttggcttctgctcag

SEQ ID NO: 4752 - DNA, 33 bp, Artificial Sequence
  Synthesized
gctcaggctttgttggattctcctcctgctcag

SEQ ID NO: 4753 - DNA, 33 bp, Artificial Sequence
  Synthesized
gctcaggctttgaatgatatgggtttggctcag

SEQ ID NO: 4754 - DNA, 33 bp, Artificial Sequence
  Synthesized
gctcaggctttgccttctgctaatcgtgctcag

SEQ ID NO: 4755 - DNA, 33 bp, Artificial Sequence
  Synthesized
gctcaggctttgcagcagtcttttgctgctcag

SEQ ID NO: 4756 - DNA, 33 bp, Artificial Sequence
  Synthesized
gctcaggctttgcagcgtcctgctcctgctcag

SEQ ID NO: 4757 - DNA, 33 bp, Artificial Sequence
  Synthesized
gctcaggctttgcgtgatactaagtttgctcag

SEQ ID NO: 4758 - DNA, 33 bp, Artificial Sequence
  Synthesized
gctcaggctttgcgttctaatattggtgctcag

SEQ ID NO: 4759 - DNA, 33 bp, Artificial Sequence
  Synthesized
gctcaggctttgcgttctgtttctcctgctcag

SEQ ID NO: 4760 - DNA, 33 bp, Artificial Sequence
  Synthesized
gctcaggctttgtcttctgctcgtgctgctcag

SEQ ID NO: 4761 - DNA, 33 bp, Artificial Sequence
  Synthesized
gctcaggctttgactgatactcgtaatgctcag

SEQ ID NO: 4762 - DNA, 33 bp, Artificial Sequence
  Synthesized
gctcaggctttgactggtttgtctcctgctcag

SEQ ID NO: 4763 - DNA, 33 bp, Artificial Sequence
  Synthesized
gctcaggctttgactaatcattctggtgctcag

SEQ ID NO: 4764 - DNA, 33 bp, Artificial Sequence
  Synthesized
gctcaggctttggttcagactcgttctgctcag

SEQ ID NO: 4765 - DNA, 33 bp, Artificial Sequence
  Synthesized
gctcaggctatggcttctaaggttcctgctcag

SEQ ID NO: 4766 - DNA, 33 bp, Artificial Sequence
  Synthesized
gctcaggctatgttttctacttctcgtgctcag

SEQ ID NO: 4767 - DNA, 33 bp, Artificial Sequence
  Synthesized
gctcaggctatgaagacttctcctttggctcag

SEQ ID NO: 4768 - DNA, 33 bp, Artificial Sequence
  Synthesized
gctcaggctatgcagcctttgaagatggctcag

SEQ ID NO: 4769 - DNA, 33 bp, Artificial Sequence
  Synthesized
gctcaggctatgcgtcattctgctatggctcag

SEQ ID NO: 4770 - DNA, 33 bp, Artificial Sequence
  Synthesized
gctcaggctatgcgtcctggtgatttggctcag

SEQ ID NO: 4771 - DNA, 33 bp, Artificial Sequence
  Synthesized
gctcaggctatgtctccttctcctcgtgctcag

SEQ ID NO: 4772 - DNA, 33 bp, Artificial Sequence
  Synthesized
gctcaggctatgactaagatgggtattgctcag

SEQ ID NO: 4773 - DNA, 33 bp, Artificial Sequence
  Synthesized
gctcaggctaatgctactcgtgttgttgctcag

SEQ ID NO: 4774 - DNA, 33 bp, Artificial Sequence
  Synthesized
gctcaggctaatgatttgaatcgttttgctcag

SEQ ID NO: 4775 - DNA, 33 bp, Artificial Sequence
  Synthesized
gctcaggctaattttactcgtttgcatgctcag

SEQ ID NO: 4776 - DNA, 33 bp, Artificial Sequence
  Synthesized
gctcaggctaattttactcgtttgatggctcag

SEQ ID NO: 4777 - DNA, 33 bp, Artificial Sequence
  Synthesized
gctcaggctaattttactcgttatcctgctcag

SEQ ID NO: 4778 - DNA, 33 bp, Artificial Sequence
  Synthesized
gctcaggctaatggtaagaatattttggctcag

SEQ ID NO: 4779 - DNA, 33 bp, Artificial Sequence
  Synthesized
gctcaggctaatggtactcgtcatcatgctcag

SEQ ID NO: 4780 - DNA, 33 bp, Artificial Sequence
  Synthesized
gctcaggctaatattactcgtaagaatgctcag

SEQ ID NO: 4781 - DNA, 33 bp, Artificial Sequence
  Synthesized
gctcaggctaataagactaattctttggctcag

SEQ ID NO: 4782 - DNA, 33 bp, Artificial Sequence
  Synthesized
gctcaggctaatttgcctgctcctaaggctcag

SEQ ID NO: 4783 - DNA, 33 bp, Artificial Sequence
  Synthesized
gctcaggctaatttgcaggttccttctgctcag

SEQ ID NO: 4784 - DNA, 33 bp, Artificial Sequence
  Synthesized
gctcaggctaataataagacttttggtgctcag

SEQ ID NO: 4785 - DNA, 33 bp, Artificial Sequence
  Synthesized
gctcaggctaataatactgctcctactgctcag

SEQ ID NO: 4786 - DNA, 33 bp, Artificial Sequence
  Synthesized
gctcaggctaataatacttttgatcctgctcag

SEQ ID NO: 4787 - DNA, 33 bp, Artificial Sequence
  Synthesized
gctcaggctaataatacttttaagattgctcag

SEQ ID NO: 4788 - DNA, 33 bp, Artificial Sequence
  Synthesized
gctcaggctaataatactatgttgcgtgctcag

SEQ ID NO: 4789 - DNA, 33 bp, Artificial Sequence
  Synthesized
gctcaggctaataatactcgtcgtcatgctcag

SEQ ID NO: 4790 - DNA, 33 bp, Artificial Sequence
  Synthesized
gctcaggctaataatactcgtcgtaaggctcag

SEQ ID NO: 4791 - DNA, 33 bp, Artificial Sequence
  Synthesized
gctcaggctaatcctggtggtgcttctgctcag

SEQ ID NO: 4792 - DNA, 33 bp, Artificial Sequence
  Synthesized
gctcaggctaatcctcatacttctactgctcag

SEQ ID NO: 4793 - DNA, 33 bp, Artificial Sequence
  Synthesized
gctcaggctaatcctcgtaaggcttctgctcag

SEQ ID NO: 4794 - DNA, 33 bp, Artificial Sequence
  Synthesized
gctcaggctaatcctcgttatttttctgctcag

SEQ ID NO: 4795 - DNA, 33 bp, Artificial Sequence
  Synthesized
gctcaggctaatcctactcgtcattctgctcag

SEQ ID NO: 4796 - DNA, 33 bp, Artificial Sequence
  Synthesized
gctcaggctaatcctgttcctcgttctgctcag

SEQ ID NO: 4797 - DNA, 33 bp, Artificial Sequence
  Synthesized
gctcaggctaatcctgttactcgttctgctcag

SEQ ID NO: 4798 - DNA, 33 bp, Artificial Sequence
  Synthesized
gctcaggctaatcctgtttatcgttctgctcag

SEQ ID NO: 4799 - DNA, 33 bp, Artificial Sequence
  Synthesized
gctcaggctaatcagttggagaaggttgctcag

SEQ ID NO: 4800 - DNA, 33 bp, Artificial Sequence
  Synthesized
gctcaggctaatcgtgattctactaaggctcag

SEQ ID NO: 4801 - DNA, 33 bp, Artificial Sequence
  Synthesized
gctcaggctaatcgtttgatgaatcctgctcag

SEQ ID NO: 4802 - DNA, 33 bp, Artificial Sequence
  Synthesized
gctcaggctaatcgtactcgtatttctgctcag

SEQ ID NO: 4803 - DNA, 33 bp, Artificial Sequence
  Synthesized
gctcaggctaattctcgtttgcctactgctcag

SEQ ID NO: 4804 - DNA, 33 bp, Artificial Sequence
  Synthesized
gctcaggctaatactggtactacttttgctcag

SEQ ID NO: 4805 - DNA, 33 bp, Artificial Sequence
  Synthesized
gctcaggctaatactactaagtcttctgctcag

SEQ ID NO: 4806 - DNA, 33 bp, Artificial Sequence
  Synthesized
gctcaggctaatactactcgtattcctgctcag

SEQ ID NO: 4807 - DNA, 33 bp, Artificial Sequence
  Synthesized
gctcaggctaatgttcagtcttttatggctcag

SEQ ID NO: 4808 - DNA, 33 bp, Artificial Sequence
  Synthesized
gctcaggctaatgttactcgtttttttgctcag

SEQ ID NO: 4809 - DNA, 33 bp, Artificial Sequence
  Synthesized
gctcaggctcctaaggcttcttttatggctcag

SEQ ID NO: 4810 - DNA, 33 bp, Artificial Sequence
  Synthesized
gctcaggctcctcagggttctttgcaggctcag

SEQ ID NO: 4811 - DNA, 33 bp, Artificial Sequence
  Synthesized
gctcaggctccttctggtattcgtggtgctcag

SEQ ID NO: 4812 - DNA, 33 bp, Artificial Sequence
  Synthesized
gctcaggctcaggctgctttgcctttggctcag

SEQ ID NO: 4813 - DNA, 33 bp, Artificial Sequence
  Synthesized
gctcaggctcaggctggtattcattctgctcag

SEQ ID NO: 4814 - DNA, 33 bp, Artificial Sequence
  Synthesized
gctcaggctcagaagtctcattctgaggctcag

SEQ ID NO: 4815 - DNA, 33 bp, Artificial Sequence
  Synthesized
gctcaggctcagttgcctaagccttatgctcag

SEQ ID NO: 4816 - DNA, 33 bp, Artificial Sequence
  Synthesized
gctcaggctcagaataatcgtatggctgctcag

SEQ ID NO: 4817 - DNA, 33 bp, Artificial Sequence
  Synthesized
gctcaggctcagcgtgctgttactactgctcag

SEQ ID NO: 4818 - DNA, 33 bp, Artificial Sequence
  Synthesized
gctcaggctcagcgtgttggtgttattgctcag

SEQ ID NO: 4819 - DNA, 33 bp, Artificial Sequence
  Synthesized
gctcaggctcagtctcgtcctttgaatgctcag

SEQ ID NO: 4820 - DNA, 33 bp, Artificial Sequence
  Synthesized
gctcaggctcagtctactcgtttggctgctcag

SEQ ID NO: 4821 - DNA, 33 bp, Artificial Sequence
  Synthesized
gctcaggctcagactaatcatgtttatgctcag

SEQ ID NO: 4822 - DNA, 33 bp, Artificial Sequence
  Synthesized
gctcaggctcaggttcagcgtgagaaggctcag

SEQ ID NO: 4823 - DNA, 33 bp, Artificial Sequence
  Synthesized
gctcaggctcgtgataagtctttgactgctcag

SEQ ID NO: 4824 - DNA, 33 bp, Artificial Sequence
  Synthesized
gctcaggctcgtgagaatactttgaaggctcag

SEQ ID NO: 4825 - DNA, 33 bp, Artificial Sequence
  Synthesized
gctcaggctcgtgagtctcgttctactgctcag

SEQ ID NO: 4826 - DNA, 33 bp, Artificial Sequence
  Synthesized
gctcaggctcgttttccttctgctatggctcag

SEQ ID NO: 4827 - DNA, 33 bp, Artificial Sequence
  Synthesized
gctcaggctcgtggtaattctttgttggctcag

SEQ ID NO: 4828 - DNA, 33 bp, Artificial Sequence
  Synthesized
gctcaggctcgtggtcagttgtctgttgctcag

SEQ ID NO: 4829 - DNA, 33 bp, Artificial Sequence
  Synthesized
gctcaggctcgtggtcgttctgctatggctcag

SEQ ID NO: 4830 - DNA, 33 bp, Artificial Sequence
  Synthesized
gctcaggctcgtattcagcagtctactgctcag

SEQ ID NO: 4831 - DNA, 33 bp, Artificial Sequence
  Synthesized
gctcaggctcgtttggctgagttgactgctcag

SEQ ID NO: 4832 - DNA, 33 bp, Artificial Sequence
  Synthesized
gctcaggctcgtttgcctggtggtaaggctcag

SEQ ID NO: 4833 - DNA, 33 bp, Artificial Sequence
  Synthesized
gctcaggctcgtatgactcctactcaggctcag

SEQ ID NO: 4834 - DNA, 33 bp, Artificial Sequence
  Synthesized
gctcaggctcgtcctaatggtcctttggctcag

SEQ ID NO: 4835 - DNA, 33 bp, Artificial Sequence
  Synthesized
gctcaggctcgttctggtattgcttctgctcag

SEQ ID NO: 4836 - DNA, 33 bp, Artificial Sequence
  Synthesized
gctcaggctcgtacttctttgactgaggctcag

SEQ ID NO: 4837 - DNA, 33 bp, Artificial Sequence
  Synthesized
gctcaggctcgtgttgagttgcgttctgctcag

SEQ ID NO: 4838 - DNA, 33 bp, Artificial Sequence
  Synthesized
gctcaggctcgtgttggtgctactgctgctcag

SEQ ID NO: 4839 - DNA, 33 bp, Artificial Sequence
  Synthesized
gctcaggctcgtgttggtgctgttaatgctcag

SEQ ID NO: 4840 - DNA, 33 bp, Artificial Sequence
  Synthesized
gctcaggctcgtgttcagggtttgggtgctcag

SEQ ID NO: 4841 - DNA, 33 bp, Artificial Sequence
  Synthesized
gctcaggctcgttattctactactcctgctcag

SEQ ID NO: 4842 - DNA, 33 bp, Artificial Sequence
  Synthesized
gctcaggcttctgctattactactgttgctcag

SEQ ID NO: 4843 - DNA, 33 bp, Artificial Sequence
  Synthesized
gctcaggcttctgctatgtcttctcgtgctcag

SEQ ID NO: 4844 - DNA, 33 bp, Artificial Sequence
  Synthesized
gctcaggcttctgctcctcctcgttctgctcag

SEQ ID NO: 4845 - DNA, 33 bp, Artificial Sequence
  Synthesized
gctcaggcttctgatcgtaattatttggctcag

SEQ ID NO: 4846 - DNA, 33 bp, Artificial Sequence
  Synthesized
gctcaggcttctgagatgcgtgttactgctcag

SEQ ID NO: 4847 - DNA, 33 bp, Artificial Sequence
  Synthesized
gctcaggcttctggtggtcgtgcttatgctcag

SEQ ID NO: 4848 - DNA, 33 bp, Artificial Sequence
  Synthesized
gctcaggcttctcatgcttctcctttggctcag

SEQ ID NO: 4849 - DNA, 33 bp, Artificial Sequence
  Synthesized
gctcaggcttctcatgttttgcgttctgctcag

SEQ ID NO: 4850 - DNA, 33 bp, Artificial Sequence
  Synthesized
gctcaggcttctattaatactggtaaggctcag

SEQ ID NO: 4851 - DNA, 33 bp, Artificial Sequence
  Synthesized
gctcaggcttctaagatgttgcagtctgctcag

SEQ ID NO: 4852 - DNA, 33 bp, Artificial Sequence
  Synthesized
gctcaggcttctaagatgtctgctgatgctcag

SEQ ID NO: 4853 - DNA, 33 bp, Artificial Sequence
  Synthesized
gctcaggcttctttgccttttcgtcgtgctcag

SEQ ID NO: 4854 - DNA, 33 bp, Artificial Sequence
  Synthesized
gctcaggcttctttgcctcgtcgttatgctcag

SEQ ID NO: 4855 - DNA, 33 bp, Artificial Sequence
  Synthesized
gctcaggcttctttgtctaatacttctgctcag

SEQ ID NO: 4856 - DNA, 33 bp, Artificial Sequence
  Synthesized
gctcaggcttctaatatgcagaatcgtgctcag

SEQ ID NO: 4857 - DNA, 33 bp, Artificial Sequence
  Synthesized
gctcaggcttctaatacttattctgttgctcag

SEQ ID NO: 4858 - DNA, 33 bp, Artificial Sequence
  Synthesized
gctcaggcttctcctcagggtcgtattgctcag

SEQ ID NO: 4859 - DNA, 33 bp, Artificial Sequence
  Synthesized
gctcaggcttctcagggttctttgtctgctcag

SEQ ID NO: 4860 - DNA, 33 bp, Artificial Sequence
  Synthesized
gctcaggcttctcagcgtaatgagatggctcag

SEQ ID NO: 4861 - DNA, 33 bp, Artificial Sequence
  Synthesized
gctcaggcttctcgtgcttcttcttctgctcag

SEQ ID NO: 4862 - DNA, 33 bp, Artificial Sequence
  Synthesized
gctcaggcttctcgttctactcctttggctcag

SEQ ID NO: 4863 - DNA, 33 bp, Artificial Sequence
  Synthesized
gctcaggcttctcgtactttggatggtgctcag

SEQ ID NO: 4864 - DNA, 33 bp, Artificial Sequence
  Synthesized
gctcaggcttctcgtactatgactcctgctcag

SEQ ID NO: 4865 - DNA, 33 bp, Artificial Sequence
  Synthesized
gctcaggcttcttctggtaagggtttggctcag

SEQ ID NO: 4866 - DNA, 33 bp, Artificial Sequence
  Synthesized
gctcaggcttcttctggtcctttgactgctcag

SEQ ID NO: 4867 - DNA, 33 bp, Artificial Sequence
  Synthesized
gctcaggcttcttctcatcatttgaaggctcag

SEQ ID NO: 4868 - DNA, 33 bp, Artificial Sequence
  Synthesized
gctcaggcttcttctcgtggtttgactgctcag

SEQ ID NO: 4869 - DNA, 33 bp, Artificial Sequence
  Synthesized
gctcaggcttcttctgttttgggtcaggctcag

SEQ ID NO: 4870 - DNA, 33 bp, Artificial Sequence
  Synthesized
gctcaggcttcttctgttgttacttctgctcag

SEQ ID NO: 4871 - DNA, 33 bp, Artificial Sequence
  Synthesized
gctcaggcttctactggttctactgctgctcag

SEQ ID NO: 4872 - DNA, 33 bp, Artificial Sequence
  Synthesized
gctcaggcttctactccttcttctaaggctcag

SEQ ID NO: 4873 - DNA, 33 bp, Artificial Sequence
  Synthesized
gctcaggcttctactactgctttgtctgctcag

SEQ ID NO: 4874 - DNA, 33 bp, Artificial Sequence
  Synthesized
gctcaggcttctgttggttatgttttggctcag

SEQ ID NO: 4875 - DNA, 33 bp, Artificial Sequence
  Synthesized
gctcaggcttcttattctccttctggtgctcag

SEQ ID NO: 4876 - DNA, 33 bp, Artificial Sequence
  Synthesized
gctcaggctactgctaagactgttatggctcag

SEQ ID NO: 4877 - DNA, 33 bp, Artificial Sequence
  Synthesized
gctcaggctactgctcgtaatgctgttgctcag

SEQ ID NO: 4878 - DNA, 33 bp, Artificial Sequence
  Synthesized
gctcaggctactgcttctactttgaaggctcag

SEQ ID NO: 4879 - DNA, 33 bp, Artificial Sequence
  Synthesized
gctcaggctactgctgttttgactaaggctcag

SEQ ID NO: 4880 - DNA, 33 bp, Artificial Sequence
  Synthesized
gctcaggctacttgtaagcagtttttggctcag

SEQ ID NO: 4881 - DNA, 33 bp, Artificial Sequence
  Synthesized
gctcaggctactggtaagaagtttttggctcag

SEQ ID NO: 4882 - DNA, 33 bp, Artificial Sequence
  Synthesized
gctcaggctactggtaagcagtttttggctcag

SEQ ID NO: 4883 - DNA, 33 bp, Artificial Sequence
  Synthesized
gctcaggctactggtaagactgttaatgctcag

SEQ ID NO: 4884 - DNA, 33 bp, Artificial Sequence
  Synthesized
gctcaggctactggtaatccttctaaggctcag

SEQ ID NO: 4885 - DNA, 33 bp, Artificial Sequence
  Synthesized
gctcaggctactcattttacttctgttgctcag

SEQ ID NO: 4886 - DNA, 33 bp, Artificial Sequence
  Synthesized
gctcaggctactcatggtttgttgcctgctcag

SEQ ID NO: 4887 - DNA, 33 bp, Artificial Sequence
  Synthesized
gctcaggctactaagaattctcgtgatgctcag

SEQ ID NO: 4888 - DNA, 33 bp, Artificial Sequence
  Synthesized
gctcaggctactaatttgaagtatcctgctcag

SEQ ID NO: 4889 - DNA, 33 bp, Artificial Sequence
  Synthesized
gctcaggctactaatttgtatcgtgaggctcag

SEQ ID NO: 4890 - DNA, 33 bp, Artificial Sequence
  Synthesized
gctcaggctactccttctgctcgtcctgctcag

SEQ ID NO: 4891 - DNA, 33 bp, Artificial Sequence
  Synthesized
gctcaggctactcgtgagcctaagcctgctcag

SEQ ID NO: 4892 - DNA, 33 bp, Artificial Sequence
  Synthesized
gctcaggctactcgtcctgctgttttggctcag

SEQ ID NO: 4893 - DNA, 33 bp, Artificial Sequence
  Synthesized
gctcaggctactcgtactactttggctgctcag

SEQ ID NO: 4894 - DNA, 33 bp, Artificial Sequence
  Synthesized
gctcaggctacttctgagaagcatttggctcag

SEQ ID NO: 4895 - DNA, 33 bp, Artificial Sequence
  Synthesized
gctcaggctacttctggttctattgctgctcag

SEQ ID NO: 4896 - DNA, 33 bp, Artificial Sequence
  Synthesized
gctcaggctacttctggtactattcctgctcag

SEQ ID NO: 4897 - DNA, 33 bp, Artificial Sequence
  Synthesized
gctcaggctacttctttgaattctaaggctcag

SEQ ID NO: 4898 - DNA, 33 bp, Artificial Sequence
  Synthesized
gctcaggctacttctcgttctgctttggctcag

SEQ ID NO: 4899 - DNA, 33 bp, Artificial Sequence
  Synthesized
gctcaggctacttcttatcgtgagtctgctcag

SEQ ID NO: 4900 - DNA, 33 bp, Artificial Sequence
  Synthesized
gctcaggctactactcgttctatgcatgctcag

SEQ ID NO: 4901 - DNA, 33 bp, Artificial Sequence
  Synthesized
gctcaggctactgttggtaagactgttgctcag

SEQ ID NO: 4902 - DNA, 33 bp, Artificial Sequence
  Synthesized
gctcaggctacttataagcagtttttggctcag

SEQ ID NO: 4903 - DNA, 33 bp, Artificial Sequence
  Synthesized
gctcaggctacttattctgcttctcctgctcag

SEQ ID NO: 4904 - DNA, 33 bp, Artificial Sequence
  Synthesized
gctcaggctgttgcttcttctcgtgctgctcag

SEQ ID NO: 4905 - DNA, 33 bp, Artificial Sequence
  Synthesized
gctcaggctgttgatcgtaatttgcgtgctcag

SEQ ID NO: 4906 - DNA, 33 bp, Artificial Sequence
  Synthesized
gctcaggctgttgagcgtactatgtttgctcag

SEQ ID NO: 4907 - DNA, 33 bp, Artificial Sequence
  Synthesized
gctcaggctgttggtcatactactttggctcag

SEQ ID NO: 4908 - DNA, 33 bp, Artificial Sequence
  Synthesized
gctcaggctgttcatgctcctcgtgctgctcag

SEQ ID NO: 4909 - DNA, 33 bp, Artificial Sequence
  Synthesized
gctcaggctgttattggtgctcctcctgctcag

SEQ ID NO: 4910 - DNA, 33 bp, Artificial Sequence
  Synthesized
gctcaggctgttaagactgagtggggtgctcag

SEQ ID NO: 4911 - DNA, 33 bp, Artificial Sequence
  Synthesized
gctcaggctgttttgaagactattggtgctcag

SEQ ID NO: 4912 - DNA, 33 bp, Artificial Sequence
  Synthesized
gctcaggctgttttgtctgcttctcgtgctcag

SEQ ID NO: 4913 - DNA, 33 bp, Artificial Sequence
  Synthesized
gctcaggctgttcctaagtctggtcctgctcag

SEQ ID NO: 4914 - DNA, 33 bp, Artificial Sequence
  Synthesized
gctcaggctgttcctgttccttctaatgctcag

SEQ ID NO: 4915 - DNA, 33 bp, Artificial Sequence
  Synthesized
gctcaggctgttgttaagtctacttatgctcag

SEQ ID NO: 4916 - DNA, 33 bp, Artificial Sequence
  Synthesized
gctcaggcttatcatcattcttttatggctcag

SEQ ID NO: 4917 - DNA, 33 bp, Artificial Sequence
  Synthesized
gctcaggcttataagatgtctcctgctgctcag

SEQ ID NO: 4918 - DNA, 33 bp, Artificial Sequence
  Synthesized
gctcaggcttatttgcctcgtcatggtgctcag

SEQ ID NO: 4919 - DNA, 33 bp, Artificial Sequence
  Synthesized
gctcaggcttatttgcctcgtcctcgtgctcag

SEQ ID NO: 4920 - DNA, 33 bp, Artificial Sequence
  Synthesized
gctcaggcttatttgcctcgttctaaggctcag

SEQ ID NO: 4921 - DNA, 33 bp, Artificial Sequence
  Synthesized
gctcaggcttatcctcctactgttggtgctcag

SEQ ID NO: 4922 - DNA, 33 bp, Artificial Sequence
  Synthesized
gctcaggcttatcgtcctcagactgttgctcag

SEQ ID NO: 4923 - DNA, 33 bp, Artificial Sequence
  Synthesized
gctcaggcttattctgatcgtatgtctgctcag

SEQ ID NO: 4924 - DNA, 33 bp, Artificial Sequence
  Synthesized
gctcagtgtttggcttgtgttgatcctgctcag

SEQ ID NO: 4925 - DNA, 33 bp, Artificial Sequence
  Synthesized
gctcagtgtatgatgtctcgttgttctgctcag

SEQ ID NO: 4926 - DNA, 33 bp, Artificial Sequence
  Synthesized
gctcagtgtaattctttgcagactgctgctcag

SEQ ID NO: 4927 - DNA, 33 bp, Artificial Sequence
  Synthesized
gctcagtgtactgatttgttgatggaggctcag

SEQ ID NO: 4928 - DNA, 33 bp, Artificial Sequence
  Synthesized
gctcagtgttggggtaagcagtttttggctcag

SEQ ID NO: 4929 - DNA, 33 bp, Artificial Sequence
  Synthesized
gctcaggatgctggtgcttctaatcgtgctcag

SEQ ID NO: 4930 - DNA, 33 bp, Artificial Sequence
  Synthesized
gctcaggatgctattatttctgctatggctcag

SEQ ID NO: 4931 - DNA, 33 bp, Artificial Sequence
  Synthesized
gctcaggatgctaagaagtctaatattgctcag

SEQ ID NO: 4932 - DNA, 33 bp, Artificial Sequence
  Synthesized
gctcaggatgctaagttgcagttgcgtgctcag

SEQ ID NO: 4933 - DNA, 33 bp, Artificial Sequence
  Synthesized
gctcaggatgctttgaagcgttctcctgctcag

SEQ ID NO: 4934 - DNA, 33 bp, Artificial Sequence
  Synthesized
gctcaggatgctttgcgttctggttctgctcag

SEQ ID NO: 4935 - DNA, 33 bp, Artificial Sequence
  Synthesized
gctcaggatgctaatttgcataatcgtgctcag

SEQ ID NO: 4936 - DNA, 33 bp, Artificial Sequence
  Synthesized
gctcaggatgctcctactatttctaaggctcag

SEQ ID NO: 4937 - DNA, 33 bp, Artificial Sequence
  Synthesized
gctcaggatgctcgtgcttcttcttctgctcag

SEQ ID NO: 4938 - DNA, 33 bp, Artificial Sequence
  Synthesized
gctcaggatgcttctcatggtaagtttgctcag

SEQ ID NO: 4939 - DNA, 33 bp, Artificial Sequence
  Synthesized
gctcaggatgctactggtgttattcgtgctcag

SEQ ID NO: 4940 - DNA, 33 bp, Artificial Sequence
  Synthesized
gctcaggatgatgctggtgttaatgctgctcag

SEQ ID NO: 4941 - DNA, 33 bp, Artificial Sequence
  Synthesized
gctcaggatgatactcgttctggtcgtgctcag

SEQ ID NO: 4942 - DNA, 33 bp, Artificial Sequence
  Synthesized
gctcaggatgagtttgattctgctatggctcag

SEQ ID NO: 4943 - DNA, 33 bp, Artificial Sequence
  Synthesized
gctcaggatgagggtttgcataatgatgctcag

SEQ ID NO: 4944 - DNA, 33 bp, Artificial Sequence
  Synthesized
gctcaggattttattcagcgtactcctgctcag

SEQ ID NO: 4945 - DNA, 33 bp, Artificial Sequence
  Synthesized
gctcaggatttttatggttctgctatggctcag

SEQ ID NO: 4946 - DNA, 33 bp, Artificial Sequence
  Synthesized
gctcaggatggtgctacttcttttatggctcag

SEQ ID NO: 4947 - DNA, 33 bp, Artificial Sequence
  Synthesized
gctcaggatggtcattattgtcattctgctcag

SEQ ID NO: 4948 - DNA, 33 bp, Artificial Sequence
  Synthesized
gctcaggatggtcattattttcattctgctcag

SEQ ID NO: 4949 - DNA, 33 bp, Artificial Sequence
  Synthesized
gctcaggatggtcattatggtcattctgctcag

SEQ ID NO: 4950 - DNA, 33 bp, Artificial Sequence
  Synthesized
gctcaggatggtcattatatgcattctgctcag

SEQ ID NO: 4951 - DNA, 33 bp, Artificial Sequence
  Synthesized
gctcaggatggtcattatcctcattctgctcag

SEQ ID NO: 4952 - DNA, 33 bp, Artificial Sequence
  Synthesized
gctcaggatggtattcgtttgactcctgctcag

SEQ ID NO: 4953 - DNA, 33 bp, Artificial Sequence
  Synthesized
gctcaggatggtaagacttctggtttggctcag

SEQ ID NO: 4954 - DNA, 33 bp, Artificial Sequence
  Synthesized
gctcaggatggtttgcctatgcgtactgctcag

SEQ ID NO: 4955 - DNA, 33 bp, Artificial Sequence
  Synthesized
gctcaggatggtttgcctcgtcatcgtgctcag

SEQ ID NO: 4956 - DNA, 33 bp, Artificial Sequence
  Synthesized
gctcaggatggtttgcctcgtatgattgctcag

SEQ ID NO: 4957 - DNA, 33 bp, Artificial Sequence
  Synthesized
gctcaggatggtttgcctactgtttttgctcag

SEQ ID NO: 4958 - DNA, 33 bp, Artificial Sequence
  Synthesized
gctcaggatggtttgcgtaatgttcctgctcag

SEQ ID NO: 4959 - DNA, 33 bp, Artificial Sequence
  Synthesized
gctcaggatggtcgtttgacttctgttgctcag

SEQ ID NO: 4960 - DNA, 33 bp, Artificial Sequence
  Synthesized
gctcaggatggtcgtcagttgttgaatgctcag

SEQ ID NO: 4961 - DNA, 33 bp, Artificial Sequence
  Synthesized
gctcaggatggttataagtctgctatggctcag

SEQ ID NO: 4962 - DNA, 33 bp, Artificial Sequence
  Synthesized
gctcaggatcatcatattcgtgttgctgctcag

SEQ ID NO: 4963 - DNA, 33 bp, Artificial Sequence
  Synthesized
gctcaggatcataaggattctaatattgctcag

SEQ ID NO: 4964 - DNA, 33 bp, Artificial Sequence
  Synthesized
gctcaggatcatttgcctaagtttcctgctcag

SEQ ID NO: 4965 - DNA, 33 bp, Artificial Sequence
  Synthesized
gctcaggatcatcagcatttgcagtatgctcag

SEQ ID NO: 4966 - DNA, 33 bp, Artificial Sequence
  Synthesized
gctcaggatcattctaagcagcgtatggctcag

SEQ ID NO: 4967 - DNA, 33 bp, Artificial Sequence
  Synthesized
gctcaggatattcctccttcttttatggctcag

SEQ ID NO: 4968 - DNA, 33 bp, Artificial Sequence
  Synthesized
gctcaggatattactaagttttcttctgctcag

SEQ ID NO: 4969 - DNA, 33 bp, Artificial Sequence
  Synthesized
gctcaggataagttgcctcatggtatggctcag

SEQ ID NO: 4970 - DNA, 33 bp, Artificial Sequence
  Synthesized
gctcaggataagaatcctcatgagaatgctcag

SEQ ID NO: 4971 - DNA, 33 bp, Artificial Sequence
  Synthesized
gctcaggataagcgtgctgttttgactgctcag

SEQ ID NO: 4972 - DNA, 33 bp, Artificial Sequence
  Synthesized
gctcaggataagcgtttgttgtctcctgctcag

SEQ ID NO: 4973 - DNA, 33 bp, Artificial Sequence
  Synthesized
gctcaggataagcgtactattgttatggctcag

SEQ ID NO: 4974 - DNA, 33 bp, Artificial Sequence
  Synthesized
gctcaggataagcgtgttcctaatcctgctcag

SEQ ID NO: 4975 - DNA, 33 bp, Artificial Sequence
  Synthesized
gctcaggataagtatgttactaaggctgctcag

SEQ ID NO: 4976 - DNA, 33 bp, Artificial Sequence
  Synthesized
gctcaggatttggctaagcctactcgtgctcag

SEQ ID NO: 4977 - DNA, 33 bp, Artificial Sequence
  Synthesized
gctcaggatttgggtatgggtatgaaggctcag

SEQ ID NO: 4978 - DNA, 33 bp, Artificial Sequence
  Synthesized
gctcaggatttgaagttgtctgctatggctcag

SEQ ID NO: 4979 - DNA, 33 bp, Artificial Sequence
  Synthesized
gctcaggatttgaagcgtactgttgatgctcag

SEQ ID NO: 4980 - DNA, 33 bp, Artificial Sequence
  Synthesized
gctcaggatttgcgtcagttgcagcctgctcag

SEQ ID NO: 4981 - DNA, 33 bp, Artificial Sequence
  Synthesized
gctcaggatttgtctactgctcgttctgctcag

SEQ ID NO: 4982 - DNA, 33 bp, Artificial Sequence
  Synthesized
gctcaggatttgactaatactcctttggctcag

SEQ ID NO: 4983 - DNA, 33 bp, Artificial Sequence
  Synthesized
gctcaggatatgaagggttctcgtaatgctcag

SEQ ID NO: 4984 - DNA, 33 bp, Artificial Sequence
  Synthesized
gctcaggatatgaagcctaatcgtaatgctcag

SEQ ID NO: 4985 - DNA, 33 bp, Artificial Sequence
  Synthesized
gctcaggatatgaatcgtttgaagactgctcag

SEQ ID NO: 4986 - DNA, 33 bp, Artificial Sequence
  Synthesized
gctcaggatatgcgtgctaagactaatgctcag

SEQ ID NO: 4987 - DNA, 33 bp, Artificial Sequence
  Synthesized
gctcaggataatgctcaggttaatcgtgctcag

SEQ ID NO: 4988 - DNA, 33 bp, Artificial Sequence
  Synthesized
gctcaggataatgattcttctgctatggctcag

SEQ ID NO: 4989 - DNA, 33 bp, Artificial Sequence
  Synthesized
gctcaggataatgagactcgtggtaatgctcag

SEQ ID NO: 4990 - DNA, 33 bp, Artificial Sequence
  Synthesized
gctcaggataattttcattcttttatggctcag

SEQ ID NO: 4991 - DNA, 33 bp, Artificial Sequence
  Synthesized
gctcaggataatcatactcgtattattgctcag

SEQ ID NO: 4992 - DNA, 33 bp, Artificial Sequence
  Synthesized
gctcaggataatcatactcgtactcaggctcag

SEQ ID NO: 4993 - DNA, 33 bp, Artificial Sequence
  Synthesized
gctcaggataataagactcgtaagggtgctcag

SEQ ID NO: 4994 - DNA, 33 bp, Artificial Sequence
  Synthesized
gctcaggataataaggttaagtctcaggctcag

SEQ ID NO: 4995 - DNA, 33 bp, Artificial Sequence
  Synthesized
gctcaggataatttgcctcgtgagcatgctcag

SEQ ID NO: 4996 - DNA, 33 bp, Artificial Sequence
  Synthesized
gctcaggataataatactgatactcctgctcag

SEQ ID NO: 4997 - DNA, 33 bp, Artificial Sequence
  Synthesized
gctcaggataataatactttgggttatgctcag

SEQ ID NO: 4998 - DNA, 33 bp, Artificial Sequence
  Synthesized
gctcaggataataatactttgcctggtgctcag

SEQ ID NO: 4999 - DNA, 33 bp, Artificial Sequence
  Synthesized
gctcaggataataatactcgtcatcgtgctcag

SEQ ID NO: 5000 - DNA, 33 bp, Artificial Sequence
  Synthesized
gctcaggataataatacttattattttgctcag

SEQ ID NO: 5001 - DNA, 33 bp, Artificial Sequence
  Synthesized
gctcaggataatcctggtcctggttctgctcag

SEQ ID NO: 5002 - DNA, 33 bp, Artificial Sequence
  Synthesized
gctcaggataatcctttgcgtccttctgctcag

SEQ ID NO: 5003 - DNA, 33 bp, Artificial Sequence
  Synthesized
gctcaggataatcctgttattcgttctgctcag

SEQ ID NO: 5004 - DNA, 33 bp, Artificial Sequence
  Synthesized
gctcaggataatcctgttcctcgttctgctcag

SEQ ID NO: 5005 - DNA, 33 bp, Artificial Sequence
  Synthesized
gctcaggataatcctgttgttcgttctgctcag

SEQ ID NO: 5006 - DNA, 33 bp, Artificial Sequence
  Synthesized
gctcaggataatcgtgttcctcgtaatgctcag

SEQ ID NO: 5007 - DNA, 33 bp, Artificial Sequence
  Synthesized
gctcaggataatactgttcgtaagcctgctcag

SEQ ID NO: 5008 - DNA, 33 bp, Artificial Sequence
  Synthesized
gctcaggataattatactcgtaagactgctcag

SEQ ID NO: 5009 - DNA, 33 bp, Artificial Sequence
  Synthesized
gctcaggatcctcatcatgctactaaggctcag

SEQ ID NO: 5010 - DNA, 33 bp, Artificial Sequence
  Synthesized
gctcaggatcctttgcctcgtggtgctgctcag

SEQ ID NO: 5011 - DNA, 33 bp, Artificial Sequence
  Synthesized
gctcaggatcctcgtgtttctcctatggctcag

SEQ ID NO: 5012 - DNA, 33 bp, Artificial Sequence
  Synthesized
gctcaggatcagcaggcttctcgtgatgctcag

SEQ ID NO: 5013 - DNA, 33 bp, Artificial Sequence
  Synthesized
gctcaggatcagcgtaagttgatgtctgctcag

SEQ ID NO: 5014 - DNA, 33 bp, Artificial Sequence
  Synthesized
gctcaggatcagcgtacttctcctcgtgctcag

SEQ ID NO: 5015 - DNA, 33 bp, Artificial Sequence
  Synthesized
gctcaggatcagtctaagactcgtgttgctcag

SEQ ID NO: 5016 - DNA, 33 bp, Artificial Sequence
  Synthesized
gctcaggatcgtgatacttctttgactgctcag

SEQ ID NO: 5017 - DNA, 33 bp, Artificial Sequence
  Synthesized
gctcaggatcgtgagggtaagattcgtgctcag

SEQ ID NO: 5018 - DNA, 33 bp, Artificial Sequence
  Synthesized
gctcaggatcgtgagaattttaataatgctcag

SEQ ID NO: 5019 - DNA, 33 bp, Artificial Sequence
  Synthesized
gctcaggatcgtattcagtctcatcaggctcag

SEQ ID NO: 5020 - DNA, 33 bp, Artificial Sequence
  Synthesized
gctcaggatcgtttgatgcctacttctgctcag

SEQ ID NO: 5021 - DNA, 33 bp, Artificial Sequence
  Synthesized
gctcaggatcgtttgaattctcgttctgctcag

SEQ ID NO: 5022 - DNA, 33 bp, Artificial Sequence
  Synthesized
gctcaggatcgtttgcagcctattaaggctcag

SEQ ID NO: 5023 - DNA, 33 bp, Artificial Sequence
  Synthesized
gctcaggatcgtttggttaagtctaatgctcag

SEQ ID NO: 5024 - DNA, 33 bp, Artificial Sequence
  Synthesized
gctcaggatcgtttggttaatgttaatgctcag

SEQ ID NO: 5025 - DNA, 33 bp, Artificial Sequence
  Synthesized
gctcaggatcgtcgtcctaatgcttctgctcag

SEQ ID NO: 5026 - DNA, 33 bp, Artificial Sequence
  Synthesized
gctcaggatcgttcttttcgtcatactgctcag

SEQ ID NO: 5027 - DNA, 33 bp, Artificial Sequence
  Synthesized
gctcaggatcgttctatgatgaagactgctcag

SEQ ID NO: 5028 - DNA, 33 bp, Artificial Sequence
  Synthesized
gctcaggatcgttctcgtttggatattgctcag

SEQ ID NO: 5029 - DNA, 33 bp, Artificial Sequence
  Synthesized
gctcaggatcgttctgttaatcagtctgctcag

SEQ ID NO: 5030 - DNA, 33 bp, Artificial Sequence
  Synthesized
gctcaggatcgtactactgtttctgaggctcag

SEQ ID NO: 5031 - DNA, 33 bp, Artificial Sequence
  Synthesized
gctcaggattctttgactaagcagatggctcag

SEQ ID NO: 5032 - DNA, 33 bp, Artificial Sequence
  Synthesized
gctcaggattctttgactcctcagaatgctcag

SEQ ID NO: 5033 - DNA, 33 bp, Artificial Sequence
  Synthesized
gctcaggattctatgtctgagcgtaatgctcag

SEQ ID NO: 5034 - DNA, 33 bp, Artificial Sequence
  Synthesized
gctcaggattctcagtcttgtcatttggctcag

SEQ ID NO: 5035 - DNA, 33 bp, Artificial Sequence
  Synthesized
gctcaggattctcagtcttggcatttggctcag

SEQ ID NO: 5036 - DNA, 33 bp, Artificial Sequence
  Synthesized
gctcaggattctcagactatggctttggctcag

SEQ ID NO: 5037 - DNA, 33 bp, Artificial Sequence
  Synthesized
gctcaggattcttctaagttgttggttgctcag

SEQ ID NO: 5038 - DNA, 33 bp, Artificial Sequence
  Synthesized
gctcaggattcttctaagcctttgaaggctcag

SEQ ID NO: 5039 - DNA, 33 bp, Artificial Sequence
  Synthesized
gctcaggattcttcttattcttctcgtgctcag

SEQ ID NO: 5040 - DNA, 33 bp, Artificial Sequence
  Synthesized
gctcaggattctactatgtcttctcgtgctcag

SEQ ID NO: 5041 - DNA, 33 bp, Artificial Sequence
  Synthesized
gctcaggattctgttgctgagcgtaatgctcag

SEQ ID NO: 5042 - DNA, 33 bp, Artificial Sequence
  Synthesized
gctcaggattctgttcgtgctggtattgctcag

SEQ ID NO: 5043 - DNA, 33 bp, Artificial Sequence
  Synthesized
gctcaggattctgtttattcttttatggctcag

SEQ ID NO: 5044 - DNA, 33 bp, Artificial Sequence
  Synthesized
gctcaggatactgctgcttcttatatggctcag

SEQ ID NO: 5045 - DNA, 33 bp, Artificial Sequence
  Synthesized
gctcaggatactgctaagcagatttatgctcag

SEQ ID NO: 5046 - DNA, 33 bp, Artificial Sequence
  Synthesized
gctcaggatactggtccttctgctatggctcag

SEQ ID NO: 5047 - DNA, 33 bp, Artificial Sequence
  Synthesized
gctcaggatactattcgtacttctgctgctcag

SEQ ID NO: 5048 - DNA, 33 bp, Artificial Sequence
  Synthesized
gctcaggatactaagcagtttcgtgctgctcag

SEQ ID NO: 5049 - DNA, 33 bp, Artificial Sequence
  Synthesized
gctcaggatactcagactgttaattttgctcag

SEQ ID NO: 5050 - DNA, 33 bp, Artificial Sequence
  Synthesized
gctcaggatactcgtaatgttgagttggctcag

SEQ ID NO: 5051 - DNA, 33 bp, Artificial Sequence
  Synthesized
gctcaggatacttctattcagaatttggctcag

SEQ ID NO: 5052 - DNA, 33 bp, Artificial Sequence
  Synthesized
gctcaggatactactcagtttactcgtgctcag

SEQ ID NO: 5053 - DNA, 33 bp, Artificial Sequence
  Synthesized
gctcaggatgttaaggctgagcaggaggctcag

SEQ ID NO: 5054 - DNA, 33 bp, Artificial Sequence
  Synthesized
gctcaggatgttaagtctgatgtttatgctcag

SEQ ID NO: 5055 - DNA, 33 bp, Artificial Sequence
  Synthesized
gctcaggatgttttgcctcgtcagcctgctcag

SEQ ID NO: 5056 - DNA, 33 bp, Artificial Sequence
  Synthesized
gctcaggatgttcgttctttgcattctgctcag

SEQ ID NO: 5057 - DNA, 33 bp, Artificial Sequence
  Synthesized
gctcaggatgttcgttctttgtctaaggctcag

SEQ ID NO: 5058 - DNA, 33 bp, Artificial Sequence
  Synthesized
gctcaggatgtttctggtaataagtgggctcag

SEQ ID NO: 5059 - DNA, 33 bp, Artificial Sequence
  Synthesized
gctcaggatgtttcttcttttgttcctgctcag

SEQ ID NO: 5060 - DNA, 33 bp, Artificial Sequence
  Synthesized
gctcaggatgttactgctggtttgcatgctcag

SEQ ID NO: 5061 - DNA, 33 bp, Artificial Sequence
  Synthesized
gctcaggatgttgttgttacttctcgtgctcag

SEQ ID NO: 5062 - DNA, 33 bp, Artificial Sequence
  Synthesized
gctcaggattatgcttctcgtaatatggctcag

SEQ ID NO: 5063 - DNA, 33 bp, Artificial Sequence
  Synthesized
gctcaggattataaggctggtggtactgctcag

SEQ ID NO: 5064 - DNA, 33 bp, Artificial Sequence
  Synthesized
gctcaggattatttgcctcgttctgttgctcag

SEQ ID NO: 5065 - DNA, 33 bp, Artificial Sequence
  Synthesized
gctcaggaggctcgttctttgaattctgctcag

SEQ ID NO: 5066 - DNA, 33 bp, Artificial Sequence
  Synthesized
gctcaggagtttgctcgttcttttatggctcag

SEQ ID NO: 5067 - DNA, 33 bp, Artificial Sequence
  Synthesized
gctcaggagtttaaggttactgatgttgctcag

SEQ ID NO: 5068 - DNA, 33 bp, Artificial Sequence
  Synthesized
gctcaggagtttttgcctggtgttaatgctcag

SEQ ID NO: 5069 - DNA, 33 bp, Artificial Sequence
  Synthesized
gctcaggagggttttttgtctgctatggctcag

SEQ ID NO: 5070 - DNA, 33 bp, Artificial Sequence
  Synthesized
gctcaggagggtattcgtactcatattgctcag

SEQ ID NO: 5071 - DNA, 33 bp, Artificial Sequence
  Synthesized
gctcaggagggtaagattcatcgttctgctcag

SEQ ID NO: 5072 - DNA, 33 bp, Artificial Sequence
  Synthesized
gctcaggagggtttggttgagattcgtgctcag

SEQ ID NO: 5073 - DNA, 33 bp, Artificial Sequence
  Synthesized
gctcaggagcatttgcctcgtcctcctgctcag

SEQ ID NO: 5074 - DNA, 33 bp, Artificial Sequence
  Synthesized
gctcaggagcatcctttgtctgctatggctcag

SEQ ID NO: 5075 - DNA, 33 bp, Artificial Sequence
  Synthesized
gctcaggagcatcgtttgactgctactgctcag

SEQ ID NO: 5076 - DNA, 33 bp, Artificial Sequence
  Synthesized
gctcaggagaaggctggtgttaataaggctcag

SEQ ID NO: 5077 - DNA, 33 bp, Artificial Sequence
  Synthesized
gctcaggagaagcgttctgatttgtctgctcag

SEQ ID NO: 5078 - DNA, 33 bp, Artificial Sequence
  Synthesized
gctcaggagaagcgtactttggagttggctcag

SEQ ID NO: 5079 - DNA, 33 bp, Artificial Sequence
  Synthesized
gctcaggagttggctcgtactgctggtgctcag

SEQ ID NO: 5080 - DNA, 33 bp, Artificial Sequence
  Synthesized
gctcaggagttgcatcgtaatcatgctgctcag

SEQ ID NO: 5081 - DNA, 33 bp, Artificial Sequence
  Synthesized
gctcaggagttgaagggtcgttattctgctcag

SEQ ID NO: 5082 - DNA, 33 bp, Artificial Sequence
  Synthesized
gctcaggagttgttgcagacttctaaggctcag

SEQ ID NO: 5083 - DNA, 33 bp, Artificial Sequence
  Synthesized
gctcaggagttgaatttgcgttcttctgctcag

SEQ ID NO: 5084 - DNA, 33 bp, Artificial Sequence
  Synthesized
gctcaggagttgtctggttctactactgctcag

SEQ ID NO: 5085 - DNA, 33 bp, Artificial Sequence
  Synthesized
gctcaggagttgtatcgtaatgcttctgctcag

SEQ ID NO: 5086 - DNA, 33 bp, Artificial Sequence
  Synthesized
gctcaggagatggctgctactcgtcatgctcag

SEQ ID NO: 5087 - DNA, 33 bp, Artificial Sequence
  Synthesized
gctcaggagatggagcatcagaagactgctcag

SEQ ID NO: 5088 - DNA, 33 bp, Artificial Sequence
  Synthesized
gctcaggagaatggtactcgtcgtcaggctcag

SEQ ID NO: 5089 - DNA, 33 bp, Artificial Sequence
  Synthesized
gctcaggagaatggtactcgttattttgctcag

SEQ ID NO: 5090 - DNA, 33 bp, Artificial Sequence
  Synthesized
gctcaggagaatcatactcgtcctcatgctcag

SEQ ID NO: 5091 - DNA, 33 bp, Artificial Sequence
  Synthesized
gctcaggagaataagattaagactaatgctcag

SEQ ID NO: 5092 - DNA, 33 bp, Artificial Sequence
  Synthesized
gctcaggagaataagactcgtgataaggctcag

SEQ ID NO: 5093 - DNA, 33 bp, Artificial Sequence
  Synthesized
gctcaggagaataatacttttggtaatgctcag

SEQ ID NO: 5094 - DNA, 33 bp, Artificial Sequence
  Synthesized
gctcaggagaataatactcattatcctgctcag

SEQ ID NO: 5095 - DNA, 33 bp, Artificial Sequence
  Synthesized
gctcaggagaataatactcctggtcctgctcag

SEQ ID NO: 5096 - DNA, 33 bp, Artificial Sequence
  Synthesized
gctcaggagaataatactcctaagcaggctcag

SEQ ID NO: 5097 - DNA, 33 bp, Artificial Sequence
  Synthesized
gctcaggagaataatactcctgttgctgctcag

SEQ ID NO: 5098 - DNA, 33 bp, Artificial Sequence
  Synthesized
gctcaggagaataatactcgtgattatgctcag

SEQ ID NO: 5099 - DNA, 33 bp, Artificial Sequence
  Synthesized
gctcaggagaataatactcgtcctcatgctcag

SEQ ID NO: 5100 - DNA, 33 bp, Artificial Sequence
  Synthesized
gctcaggagaataatacttatgaggatgctcag

SEQ ID NO: 5101 - DNA, 33 bp, Artificial Sequence
  Synthesized
gctcaggagaataatacttatggtgaggctcag

SEQ ID NO: 5102 - DNA, 33 bp, Artificial Sequence
  Synthesized
gctcaggagaatcctcatggttattctgctcag

SEQ ID NO: 5103 - DNA, 33 bp, Artificial Sequence
  Synthesized
gctcaggagaatcctaagcctgagtctgctcag

SEQ ID NO: 5104 - DNA, 33 bp, Artificial Sequence
  Synthesized
gctcaggagaatcctcctgagcagtctgctcag

SEQ ID NO: 5105 - DNA, 33 bp, Artificial Sequence
  Synthesized
gctcaggagaatcctgttcatcgttctgctcag

SEQ ID NO: 5106 - DNA, 33 bp, Artificial Sequence
  Synthesized
gctcaggagaatcctgttaatcgttctgctcag

SEQ ID NO: 5107 - DNA, 33 bp, Artificial Sequence
  Synthesized
gctcaggagaatcctgtttctcgttctgctcag

SEQ ID NO: 5108 - DNA, 33 bp, Artificial Sequence
  Synthesized
gctcaggagaatcaggttcgtaatactgctcag

SEQ ID NO: 5109 - DNA, 33 bp, Artificial Sequence
  Synthesized
gctcaggagaatgttactcgtcgtcctgctcag

SEQ ID NO: 5110 - DNA, 33 bp, Artificial Sequence
  Synthesized
gctcaggagaatgttactcgtgtttctgctcag

SEQ ID NO: 5111 - DNA, 33 bp, Artificial Sequence
  Synthesized
gctcaggagaattatactcgtcaggatgctcag

SEQ ID NO: 5112 - DNA, 33 bp, Artificial Sequence
  Synthesized
gctcaggagcctaagaatgctgtttttgctcag

SEQ ID NO: 5113 - DNA, 33 bp, Artificial Sequence
  Synthesized
gctcaggagcaggatcattataagtctgctcag

SEQ ID NO: 5114 - DNA, 33 bp, Artificial Sequence
  Synthesized
gctcaggagcgtgctttgtcttctgaggctcag

SEQ ID NO: 5115 - DNA, 33 bp, Artificial Sequence
  Synthesized
gctcaggagcgtgcttctaataatggtgctcag

SEQ ID NO: 5116 - DNA, 33 bp, Artificial Sequence
  Synthesized
gctcaggagcgtgagtattctgctatggctcag

SEQ ID NO: 5117 - DNA, 33 bp, Artificial Sequence
  Synthesized
gctcaggagcgttttcaggagaaggttgctcag

SEQ ID NO: 5118 - DNA, 33 bp, Artificial Sequence
  Synthesized
gctcaggagcgtcatttttcttttatggctcag

SEQ ID NO: 5119 - DNA, 33 bp, Artificial Sequence
  Synthesized
gctcaggagcgtcatcattcttttatggctcag

SEQ ID NO: 5120 - DNA, 33 bp, Artificial Sequence
  Synthesized
gctcaggagcgtcatcagcatgctaatgctcag

SEQ ID NO: 5121 - DNA, 33 bp, Artificial Sequence
  Synthesized
gctcaggagcgtaagatgactactttggctcag

SEQ ID NO: 5122 - DNA, 33 bp, Artificial Sequence
  Synthesized
gctcaggagcgtttgcctgataagcatgctcag

SEQ ID NO: 5123 - DNA, 33 bp, Artificial Sequence
  Synthesized
gctcaggagcgtttgcctcagactgctgctcag

SEQ ID NO: 5124 - DNA, 33 bp, Artificial Sequence
  Synthesized
gctcaggagcgtttgcagtctcctaaggctcag

SEQ ID NO: 5125 - DNA, 33 bp, Artificial Sequence
  Synthesized
gctcaggagcgtaataagcagactcctgctcag

SEQ ID NO: 5126 - DNA, 33 bp, Artificial Sequence
  Synthesized
gctcaggagcgtcctgcttctgctatggctcag

SEQ ID NO: 5127 - DNA, 33 bp, Artificial Sequence
  Synthesized
gctcaggagcgtactgagtcttctttggctcag

SEQ ID NO: 5128 - DNA, 33 bp, Artificial Sequence
  Synthesized
gctcaggagtctattggtgatcagtctgctcag

SEQ ID NO: 5129 - DNA, 33 bp, Artificial Sequence
  Synthesized
gctcaggagtctttgcctcgtcgttctgctcag

SEQ ID NO: 5130 - DNA, 33 bp, Artificial Sequence
  Synthesized
gctcaggagtctatgactggtgttttggctcag

SEQ ID NO: 5131 - DNA, 33 bp, Artificial Sequence
  Synthesized
gctcaggagtctatgactaatcgtactgctcag

SEQ ID NO: 5132 - DNA, 33 bp, Artificial Sequence
  Synthesized
gctcaggagtctcgtatttctatgcaggctcag

SEQ ID NO: 5133 - DNA, 33 bp, Artificial Sequence
  Synthesized
gctcaggagtctcgttcttctcgtgttgctcag

SEQ ID NO: 5134 - DNA, 33 bp, Artificial Sequence
  Synthesized
gctcaggagtctcgttcttcttatcaggctcag

SEQ ID NO: 5135 - DNA, 33 bp, Artificial Sequence
  Synthesized
gctcaggagtcttcttctgttttgcatgctcag

SEQ ID NO: 5136 - DNA, 33 bp, Artificial Sequence
  Synthesized
gctcaggagtctactgttgatactcgtgctcag

SEQ ID NO: 5137 - DNA, 33 bp, Artificial Sequence
  Synthesized
gctcaggagtctgtttcttctttgtctgctcag

SEQ ID NO: 5138 - DNA, 33 bp, Artificial Sequence
  Synthesized
gctcaggagtctgttactcgtggtgatgctcag

SEQ ID NO: 5139 - DNA, 33 bp, Artificial Sequence
  Synthesized
gctcaggagactggtaagcagtttttggctcag

SEQ ID NO: 5140 - DNA, 33 bp, Artificial Sequence
  Synthesized
gctcaggagactggtgttcgtaatgctgctcag

SEQ ID NO: 5141 - DNA, 33 bp, Artificial Sequence
  Synthesized
gctcaggagactcatccttctgctatggctcag

SEQ ID NO: 5142 - DNA, 33 bp, Artificial Sequence
  Synthesized
gctcaggagacttctcgtacttcttctgctcag

SEQ ID NO: 5143 - DNA, 33 bp, Artificial Sequence
  Synthesized
gctcaggaggttaagcgtttgtctgctgctcag

SEQ ID NO: 5144 - DNA, 33 bp, Artificial Sequence
  Synthesized
gctcaggagtatgatcgttctaagtctgctcag

SEQ ID NO: 5145 - DNA, 33 bp, Artificial Sequence
  Synthesized
gctcaggagtatttgccttatcataaggctcag

SEQ ID NO: 5146 - DNA, 33 bp, Artificial Sequence
  Synthesized
gctcagtttgctggtattcctggtcaggctcag

SEQ ID NO: 5147 - DNA, 33 bp, Artificial Sequence
  Synthesized
gctcagtttgctttgcctaatggttatgctcag

SEQ ID NO: 5148 - DNA, 33 bp, Artificial Sequence
  Synthesized
gctcagtttgctatgatgtctgctatggctcag

SEQ ID NO: 5149 - DNA, 33 bp, Artificial Sequence
  Synthesized
gctcagtttgcttctaagtctactcatgctcag

SEQ ID NO: 5150 - DNA, 33 bp, Artificial Sequence
  Synthesized
gctcagtttgcttatcattcttttatggctcag

SEQ ID NO: 5151 - DNA, 33 bp, Artificial Sequence
  Synthesized
gctcagtttgataagactaatcgtggtgctcag

SEQ ID NO: 5152 - DNA, 33 bp, Artificial Sequence
  Synthesized
gctcagtttgatttgtctaatatgaaggctcag

SEQ ID NO: 5153 - DNA, 33 bp, Artificial Sequence
  Synthesized
gctcagtttgagaagaattctcgtcctgctcag

SEQ ID NO: 5154 - DNA, 33 bp, Artificial Sequence
  Synthesized
gctcagtttgagttgcctcgtcctcatgctcag

SEQ ID NO: 5155 - DNA, 33 bp, Artificial Sequence
  Synthesized
gctcagttttttggtggttcttttatggctcag

SEQ ID NO: 5156 - DNA, 33 bp, Artificial Sequence
  Synthesized
gctcagttttttggtcagtcttttatggctcag

SEQ ID NO: 5157 - DNA, 33 bp, Artificial Sequence
  Synthesized
gctcagttttttccttattcttttatggctcag

SEQ ID NO: 5158 - DNA, 33 bp, Artificial Sequence
  Synthesized
gctcagtttggtggtgatcgtactcgtgctcag

SEQ ID NO: 5159 - DNA, 33 bp, Artificial Sequence
  Synthesized
gctcagtttggtggtttgtctgctatggctcag

SEQ ID NO: 5160 - DNA, 33 bp, Artificial Sequence
  Synthesized
gctcagtttggtcatcattctgctatggctcag

SEQ ID NO: 5161 - DNA, 33 bp, Artificial Sequence
  Synthesized
gctcagtttggtattatttcttttatggctcag

SEQ ID NO: 5162 - DNA, 33 bp, Artificial Sequence
  Synthesized
gctcagtttggtattgttactaataatgctcag

SEQ ID NO: 5163 - DNA, 33 bp, Artificial Sequence
  Synthesized
gctcagtttggtaagactgttgtttctgctcag

SEQ ID NO: 5164 - DNA, 33 bp, Artificial Sequence
  Synthesized
gctcagtttggtttggagcgtaataatgctcag

SEQ ID NO: 5165 - DNA, 33 bp, Artificial Sequence
  Synthesized
gctcagtttggtttgaagaatattcctgctcag

SEQ ID NO: 5166 - DNA, 33 bp, Artificial Sequence
  Synthesized
gctcagtttggtcctttttctgctatggctcag

SEQ ID NO: 5167 - DNA, 33 bp, Artificial Sequence
  Synthesized
gctcagtttggtcctcagtcttttatggctcag

SEQ ID NO: 5168 - DNA, 33 bp, Artificial Sequence
  Synthesized
gctcagtttggtcagaagtctttgcaggctcag

SEQ ID NO: 5169 - DNA, 33 bp, Artificial Sequence
  Synthesized
gctcagtttggtcgtattggttctgctgctcag

SEQ ID NO: 5170 - DNA, 33 bp, Artificial Sequence
  Synthesized
gctcagtttggttctgttcctaagaatgctcag

SEQ ID NO: 5171 - DNA, 33 bp, Artificial Sequence
  Synthesized
gctcagtttcatgatgattctgctatggctcag

SEQ ID NO: 5172 - DNA, 33 bp, Artificial Sequence
  Synthesized
gctcagtttcatattgattcttttatggctcag

SEQ ID NO: 5173 - DNA, 33 bp, Artificial Sequence
  Synthesized
gctcagtttcatttgcctatgacttctgctcag

SEQ ID NO: 5174 - DNA, 33 bp, Artificial Sequence
  Synthesized
gctcagtttcatttgcctcgtggtaatgctcag

SEQ ID NO: 5175 - DNA, 33 bp, Artificial Sequence
  Synthesized
gctcagtttcatttgcctcgtcattatgctcag

SEQ ID NO: 5176 - DNA, 33 bp, Artificial Sequence
  Synthesized
gctcagtttcatttgcctcgtcagcatgctcag

SEQ ID NO: 5177 - DNA, 33 bp, Artificial Sequence
  Synthesized
gctcagtttcatcctggttcttttatggctcag

SEQ ID NO: 5178 - DNA, 33 bp, Artificial Sequence
  Synthesized
gctcagtttcatcgtacttctgctatggctcag

SEQ ID NO: 5179 - DNA, 33 bp, Artificial Sequence
  Synthesized
gctcagtttcatactcagtctgctatggctcag

SEQ ID NO: 5180 - DNA, 33 bp, Artificial Sequence
  Synthesized
gctcagtttattggtggtttgtctgctgctcag

SEQ ID NO: 5181 - DNA, 33 bp, Artificial Sequence
  Synthesized
gctcagtttattaatggttcttttatggctcag

SEQ ID NO: 5182 - DNA, 33 bp, Artificial Sequence
  Synthesized
gctcagtttattcctcattcttttatggctcag

SEQ ID NO: 5183 - DNA, 33 bp, Artificial Sequence
  Synthesized
gctcagtttaagtctgttaaggctgaggctcag

SEQ ID NO: 5184 - DNA, 33 bp, Artificial Sequence
  Synthesized
gctcagtttttgttgcctcgtggttatgctcag

SEQ ID NO: 5185 - DNA, 33 bp, Artificial Sequence
  Synthesized
gctcagtttttgactgctggttctaaggctcag

SEQ ID NO: 5186 - DNA, 33 bp, Artificial Sequence
  Synthesized
gctcagtttatgatttcttctgctatggctcag

SEQ ID NO: 5187 - DNA, 33 bp, Artificial Sequence
  Synthesized
gctcagtttaatgctaatcctttgaaggctcag

SEQ ID NO: 5188 - DNA, 33 bp, Artificial Sequence
  Synthesized
gctcagtttaatgctcgtggttcttctgctcag

SEQ ID NO: 5189 - DNA, 33 bp, Artificial Sequence
  Synthesized
gctcagtttaatgattgtacttttattgctcag

SEQ ID NO: 5190 - DNA, 33 bp, Artificial Sequence
  Synthesized
gctcagtttaatgattgtacttggattgctcag

SEQ ID NO: 5191 - DNA, 33 bp, Artificial Sequence
  Synthesized
gctcagtttaatgatgagacttgtattgctcag

SEQ ID NO: 5192 - DNA, 33 bp, Artificial Sequence
  Synthesized
gctcagtttaatgattttacttttattgctcag

SEQ ID NO: 5193 - DNA, 33 bp, Artificial Sequence
  Synthesized
gctcagtttaatgatattacttgtattgctcag

SEQ ID NO: 5194 - DNA, 33 bp, Artificial Sequence
  Synthesized
gctcagtttaatgatattacttttattgctcag

SEQ ID NO: 5195 - DNA, 33 bp, Artificial Sequence
  Synthesized
gctcagtttaatgatattacttggattgctcag

SEQ ID NO: 5196 - DNA, 33 bp, Artificial Sequence
  Synthesized
gctcagtttaatgatttgactactattgctcag

SEQ ID NO: 5197 - DNA, 33 bp, Artificial Sequence
  Synthesized
gctcagtttaatgattatacttggattgctcag

SEQ ID NO: 5198 - DNA, 33 bp, Artificial Sequence
  Synthesized
gctcagtttaattttactcgtaagattgctcag

SEQ ID NO: 5199 - DNA, 33 bp, Artificial Sequence
  Synthesized
gctcagtttaatggtactcgtcattttgctcag

SEQ ID NO: 5200 - DNA, 33 bp, Artificial Sequence
  Synthesized
gctcagtttaatggtactcgttctcatgctcag

SEQ ID NO: 5201 - DNA, 33 bp, Artificial Sequence
  Synthesized
gctcagtttaatcatactcgttttcctgctcag

SEQ ID NO: 5202 - DNA, 33 bp, Artificial Sequence
  Synthesized
gctcagtttaatcatactcgtattatggctcag

SEQ ID NO: 5203 - DNA, 33 bp, Artificial Sequence
  Synthesized
gctcagtttaatcatactcgtcgtcctgctcag

SEQ ID NO: 5204 - DNA, 33 bp, Artificial Sequence
  Synthesized
gctcagtttaatattactcgtggtcatgctcag

SEQ ID NO: 5205 - DNA, 33 bp, Artificial Sequence
  Synthesized
gctcagtttaatttgccttatcatggtgctcag

SEQ ID NO: 5206 - DNA, 33 bp, Artificial Sequence
  Synthesized
gctcagtttaatttgtctaatgagatggctcag

SEQ ID NO: 5207 - DNA, 33 bp, Artificial Sequence
  Synthesized
gctcagtttaatatgactcgttttaaggctcag

SEQ ID NO: 5208 - DNA, 33 bp, Artificial Sequence
  Synthesized
gctcagtttaatatgactcgtactggtgctcag

SEQ ID NO: 5209 - DNA, 33 bp, Artificial Sequence
  Synthesized
gctcagtttaataatactgagcctgctgctcag

SEQ ID NO: 5210 - DNA, 33 bp, Artificial Sequence
  Synthesized
gctcagtttaataatacttttaagcgtgctcag

SEQ ID NO: 5211 - DNA, 33 bp, Artificial Sequence
  Synthesized
gctcagtttaataatactttttattctgctcag

SEQ ID NO: 5212 - DNA, 33 bp, Artificial Sequence
  Synthesized
gctcagtttaataatactggtgagcatgctcag

SEQ ID NO: 5213 - DNA, 33 bp, Artificial Sequence
  Synthesized
gctcagtttaataatactcatcatattgctcag

SEQ ID NO: 5214 - DNA, 33 bp, Artificial Sequence
  Synthesized
gctcagtttaataatactattttgcctgctcag

SEQ ID NO: 5215 - DNA, 33 bp, Artificial Sequence
  Synthesized
gctcagtttaataatactaagcagcatgctcag

SEQ ID NO: 5216 - DNA, 33 bp, Artificial Sequence
  Synthesized
gctcagtttaataatactcctggtcgtgctcag

SEQ ID NO: 5217 - DNA, 33 bp, Artificial Sequence
  Synthesized
gctcagtttaataatactccttatgctgctcag

SEQ ID NO: 5218 - DNA, 33 bp, Artificial Sequence
  Synthesized
gctcagtttaataatactcagcattttgctcag

SEQ ID NO: 5219 - DNA, 33 bp, Artificial Sequence
  Synthesized
gctcagtttaataatactcgtcattatgctcag

SEQ ID NO: 5220 - DNA, 33 bp, Artificial Sequence
  Synthesized
gctcagtttaataatactgttgctcaggctcag

SEQ ID NO: 5221 - DNA, 33 bp, Artificial Sequence
  Synthesized
gctcagtttaataatacttatcgtgctgctcag

SEQ ID NO: 5222 - DNA, 33 bp, Artificial Sequence
  Synthesized
gctcagtttaatcctatttatggttctgctcag

SEQ ID NO: 5223 - DNA, 33 bp, Artificial Sequence
  Synthesized
gctcagtttaatcctatgcgtttttctgctcag

SEQ ID NO: 5224 - DNA, 33 bp, Artificial Sequence
  Synthesized
gctcagtttaatcctatggttggttctgctcag

SEQ ID NO: 5225 - DNA, 33 bp, Artificial Sequence
  Synthesized
gctcagtttaatcctcgtcgtatttctgctcag

SEQ ID NO: 5226 - DNA, 33 bp, Artificial Sequence
  Synthesized
gctcagtttaatcctgttcatcgttctgctcag

SEQ ID NO: 5227 - DNA, 33 bp, Artificial Sequence
  Synthesized
gctcagtttaatcctgttaagcgttctgctcag

SEQ ID NO: 5228 - DNA, 33 bp, Artificial Sequence
  Synthesized
gctcagtttaatcctgttttgcgttctgctcag

SEQ ID NO: 5229 - DNA, 33 bp, Artificial Sequence
  Synthesized
gctcagtttaatccttattcttcttctgctcag

SEQ ID NO: 5230 - DNA, 33 bp, Artificial Sequence
  Synthesized
gctcagtttaatcgtactcgtaattctgctcag

SEQ ID NO: 5231 - DNA, 33 bp, Artificial Sequence
  Synthesized
gctcagtttaattctttgggtaatcctgctcag

SEQ ID NO: 5232 - DNA, 33 bp, Artificial Sequence
  Synthesized
gctcagtttaattctttgtcttctgctgctcag

SEQ ID NO: 5233 - DNA, 33 bp, Artificial Sequence
  Synthesized
gctcagtttaattctactaaggttgttgctcag

SEQ ID NO: 5234 - DNA, 33 bp, Artificial Sequence
  Synthesized
gctcagtttaatactactcgtgctcatgctcag

SEQ ID NO: 5235 - DNA, 33 bp, Artificial Sequence
  Synthesized
gctcagtttaatgttactcgtatgtctgctcag

SEQ ID NO: 5236 - DNA, 33 bp, Artificial Sequence
  Synthesized
gctcagtttaattatactcgtcctggtgctcag

SEQ ID NO: 5237 - DNA, 33 bp, Artificial Sequence
  Synthesized
gctcagtttaattatactcgtcctcatgctcag

SEQ ID NO: 5238 - DNA, 33 bp, Artificial Sequence
  Synthesized
gctcagtttcctggtaagtctgatttggctcag

SEQ ID NO: 5239 - DNA, 33 bp, Artificial Sequence
  Synthesized
gctcagtttcctcatacttctgctatggctcag

SEQ ID NO: 5240 - DNA, 33 bp, Artificial Sequence
  Synthesized
gctcagtttcctaagggtcagtctaatgctcag

SEQ ID NO: 5241 - DNA, 33 bp, Artificial Sequence
  Synthesized
gctcagtttcctaagaatggtcgtgatgctcag

SEQ ID NO: 5242 - DNA, 33 bp, Artificial Sequence
  Synthesized
gctcagtttcctttgcctattcatgctgctcag

SEQ ID NO: 5243 - DNA, 33 bp, Artificial Sequence
  Synthesized
gctcagtttcctttgcctcgtccttatgctcag

SEQ ID NO: 5244 - DNA, 33 bp, Artificial Sequence
  Synthesized
gctcagtttcctttgccttctcctactgctcag

SEQ ID NO: 5245 - DNA, 33 bp, Artificial Sequence
  Synthesized
gctcagtttcctaatactcgtcaggatgctcag

SEQ ID NO: 5246 - DNA, 33 bp, Artificial Sequence
  Synthesized
gctcagtttcctcctggttcttttatggctcag

SEQ ID NO: 5247 - DNA, 33 bp, Artificial Sequence
  Synthesized
gctcagtttcctcagtcttctgcttctgctcag

SEQ ID NO: 5248 - DNA, 33 bp, Artificial Sequence
  Synthesized
gctcagtttcctcgtggttcttttatggctcag

SEQ ID NO: 5249 - DNA, 33 bp, Artificial Sequence
  Synthesized
gctcagtttcctcgttctgctgatgttgctcag

SEQ ID NO: 5250 - DNA, 33 bp, Artificial Sequence
  Synthesized
gctcagtttcaggcttctaagggtactgctcag

SEQ ID NO: 5251 - DNA, 33 bp, Artificial Sequence
  Synthesized
gctcagtttcagtttccttctgctatggctcag

SEQ ID NO: 5252 - DNA, 33 bp, Artificial Sequence
  Synthesized
gctcagtttcagttgcctcgtcataaggctcag

SEQ ID NO: 5253 - DNA, 33 bp, Artificial Sequence
  Synthesized
gctcagtttcagtctgctaatgataaggctcag

SEQ ID NO: 5254 - DNA, 33 bp, Artificial Sequence
  Synthesized
gctcagtttcagtctgagcattctttggctcag

SEQ ID NO: 5255 - DNA, 33 bp, Artificial Sequence
  Synthesized
gctcagtttcagacttgtcatgttggtgctcag

SEQ ID NO: 5256 - DNA, 33 bp, Artificial Sequence
  Synthesized
gctcagtttcagacttttcatgttggtgctcag

SEQ ID NO: 5257 - DNA, 33 bp, Artificial Sequence
  Synthesized
gctcagtttcagactcctcatgttggtgctcag

SEQ ID NO: 5258 - DNA, 33 bp, Artificial Sequence
  Synthesized
gctcagtttcagactcgtcatgttggtgctcag

SEQ ID NO: 5259 - DNA, 33 bp, Artificial Sequence
  Synthesized
gctcagtttcgtgagtcttctgctatggctcag

SEQ ID NO: 5260 - DNA, 33 bp, Artificial Sequence
  Synthesized
gctcagtttcgtttgaagtcttctgatgctcag

SEQ ID NO: 5261 - DNA, 33 bp, Artificial Sequence
  Synthesized
gctcagtttcgtttgcctcagcctaatgctcag

SEQ ID NO: 5262 - DNA, 33 bp, Artificial Sequence
  Synthesized
gctcagtttcgtaataatgttactcaggctcag

SEQ ID NO: 5263 - DNA, 33 bp, Artificial Sequence
  Synthesized
gctcagtttcgtaatgttatgactgaggctcag

SEQ ID NO: 5264 - DNA, 33 bp, Artificial Sequence
  Synthesized
gctcagtttcgtactgagtcttttatggctcag

SEQ ID NO: 5265 - DNA, 33 bp, Artificial Sequence
  Synthesized
gctcagtttcgttattattctgctatggctcag

SEQ ID NO: 5266 - DNA, 33 bp, Artificial Sequence
  Synthesized
gctcagttttctgctggtttgcatggtgctcag

SEQ ID NO: 5267 - DNA, 33 bp, Artificial Sequence
  Synthesized
gctcagttttcttttcgttctgctatggctcag

SEQ ID NO: 5268 - DNA, 33 bp, Artificial Sequence
  Synthesized
gctcagttttctaaggctgctggtcaggctcag

SEQ ID NO: 5269 - DNA, 33 bp, Artificial Sequence
  Synthesized
gctcagttttctaaggttttgcctaatgctcag

SEQ ID NO: 5270 - DNA, 33 bp, Artificial Sequence
  Synthesized
gctcagttttctttgttgtctcctgaggctcag

SEQ ID NO: 5271 - DNA, 33 bp, Artificial Sequence
  Synthesized
gctcagttttctttgcctcgtgattatgctcag

SEQ ID NO: 5272 - DNA, 33 bp, Artificial Sequence
  Synthesized
gctcagttttctcgtaagtctgatgatgctcag

SEQ ID NO: 5273 - DNA, 33 bp, Artificial Sequence
  Synthesized
gctcagttttcttctaatacttctcaggctcag

SEQ ID NO: 5274 - DNA, 33 bp, Artificial Sequence
  Synthesized
gctcagttttctactgctactcgtggtgctcag

SEQ ID NO: 5275 - DNA, 33 bp, Artificial Sequence
  Synthesized
gctcagttttctactaagaattctcaggctcag

SEQ ID NO: 5276 - DNA, 33 bp, Artificial Sequence
  Synthesized
gctcagttttctactaataagtctaatgctcag

SEQ ID NO: 5277 - DNA, 33 bp, Artificial Sequence
  Synthesized
gctcagttttctacttctaatattcgtgctcag

SEQ ID NO: 5278 - DNA, 33 bp, Artificial Sequence
  Synthesized
gctcagttttctactactcgttctaatgctcag

SEQ ID NO: 5279 - DNA, 33 bp, Artificial Sequence
  Synthesized
gctcagtttactgatccttcttctcgtgctcag

SEQ ID NO: 5280 - DNA, 33 bp, Artificial Sequence
  Synthesized
gctcagtttactcgtggtttgaatggtgctcag

SEQ ID NO: 5281 - DNA, 33 bp, Artificial Sequence
  Synthesized
gctcagtttgttgctgttccttctgatgctcag

SEQ ID NO: 5282 - DNA, 33 bp, Artificial Sequence
  Synthesized
gctcagtttgttaagcaggttggtactgctcag

SEQ ID NO: 5283 - DNA, 33 bp, Artificial Sequence
  Synthesized
gctcagttttatgagaagtctacttctgctcag

SEQ ID NO: 5284 - DNA, 33 bp, Artificial Sequence
  Synthesized
gctcagttttatggtatttcttttatggctcag

SEQ ID NO: 5285 - DNA, 33 bp, Artificial Sequence
  Synthesized
gctcagttttatttgcctcgtactaaggctcag

SEQ ID NO: 5286 - DNA, 33 bp, Artificial Sequence
  Synthesized
gctcagttttatcctaagtcttttatggctcag

SEQ ID NO: 5287 - DNA, 33 bp, Artificial Sequence
  Synthesized
gctcagggtgctgctactgaggttcaggctcag

SEQ ID NO: 5288 - DNA, 33 bp, Artificial Sequence
  Synthesized
gctcagggtgctgagccttcttttatggctcag

SEQ ID NO: 5289 - DNA, 33 bp, Artificial Sequence
  Synthesized
gctcagggtgcttttgcttcttctcctgctcag

SEQ ID NO: 5290 - DNA, 33 bp, Artificial Sequence
  Synthesized
gctcagggtgctggtcgtgctttgaatgctcag

SEQ ID NO: 5291 - DNA, 33 bp, Artificial Sequence
  Synthesized
gctcagggtgctggttctttgtcttctgctcag

SEQ ID NO: 5292 - DNA, 33 bp, Artificial Sequence
  Synthesized
gctcagggtgctcatactggtattaaggctcag

SEQ ID NO: 5293 - DNA, 33 bp, Artificial Sequence
  Synthesized
gctcagggtgctattcatttgcgtgatgctcag

SEQ ID NO: 5294 - DNA, 33 bp, Artificial Sequence
  Synthesized
gctcagggtgctattcattctgctatggctcag

SEQ ID NO: 5295 - DNA, 33 bp, Artificial Sequence
  Synthesized
gctcagggtgctaagtctcctgctaatgctcag

SEQ ID NO: 5296 - DNA, 33 bp, Artificial Sequence
  Synthesized
gctcagggtgctaagtctcctaataatgctcag

SEQ ID NO: 5297 - DNA, 33 bp, Artificial Sequence
  Synthesized
gctcagggtgctttggagactgatcgtgctcag

SEQ ID NO: 5298 - DNA, 33 bp, Artificial Sequence
  Synthesized
gctcagggtgctttgcctcgtatgcctgctcag

SEQ ID NO: 5299 - DNA, 33 bp, Artificial Sequence
  Synthesized
gctcagggtgctaattctatgttgtctgctcag

SEQ ID NO: 5300 - DNA, 33 bp, Artificial Sequence
  Synthesized
gctcagggtgctcgtccttcttttatggctcag

SEQ ID NO: 5301 - DNA, 33 bp, Artificial Sequence
  Synthesized
gctcagggtgctactactaatcgtattgctcag

SEQ ID NO: 5302 - DNA, 33 bp, Artificial Sequence
  Synthesized
gctcagggtgctgttttgaatcagattgctcag

SEQ ID NO: 5303 - DNA, 33 bp, Artificial Sequence
  Synthesized
gctcagggtgcttatccttcttttatggctcag

SEQ ID NO: 5304 - DNA, 33 bp, Artificial Sequence
  Synthesized
gctcagggtgattttcgttctaaggatgctcag

SEQ ID NO: 5305 - DNA, 33 bp, Artificial Sequence
  Synthesized
gctcagggtgatttggctaatcgtaaggctcag

SEQ ID NO: 5306 - DNA, 33 bp, Artificial Sequence
  Synthesized
gctcagggtgatttgcctcgtggttatgctcag

SEQ ID NO: 5307 - DNA, 33 bp, Artificial Sequence
  Synthesized
gctcagggtgatcagtttaattctgttgctcag

SEQ ID NO: 5308 - DNA, 33 bp, Artificial Sequence
  Synthesized
gctcagggtgatcgtttgtctgctaatgctcag

SEQ ID NO: 5309 - DNA, 33 bp, Artificial Sequence
  Synthesized
gctcagggtgaggctaagcagaagtgggctcag

SEQ ID NO: 5310 - DNA, 33 bp, Artificial Sequence
  Synthesized
gctcagggtgagcatttgttgacttttgctcag

SEQ ID NO: 5311 - DNA, 33 bp, Artificial Sequence
  Synthesized
gctcagggtgagaagaagttgatgactgctcag

SEQ ID NO: 5312 - DNA, 33 bp, Artificial Sequence
  Synthesized
gctcagggtgagttgcctgataagggtgctcag

SEQ ID NO: 5313 - DNA, 33 bp, Artificial Sequence
  Synthesized
gctcagggtgagttgcctcctaatatggctcag

SEQ ID NO: 5314 - DNA, 33 bp, Artificial Sequence
  Synthesized
gctcagggtgagcgttctgttattttggctcag

SEQ ID NO: 5315 - DNA, 33 bp, Artificial Sequence
  Synthesized
gctcagggtgagacttctgctaatttggctcag

SEQ ID NO: 5316 - DNA, 33 bp, Artificial Sequence
  Synthesized
gctcagggtgaggtttctcatccttgggctcag

SEQ ID NO: 5317 - DNA, 33 bp, Artificial Sequence
  Synthesized
gctcagggttttgctaattttaattctgctcag

SEQ ID NO: 5318 - DNA, 33 bp, Artificial Sequence
  Synthesized
gctcagggttttcatgtttcttttatggctcag

SEQ ID NO: 5319 - DNA, 33 bp, Artificial Sequence
  Synthesized
gctcagggttttaagactgttgttaatgctcag

SEQ ID NO: 5320 - DNA, 33 bp, Artificial Sequence
  Synthesized
gctcagggttttttgcctcgttttcctgctcag

SEQ ID NO: 5321 - DNA, 33 bp, Artificial Sequence
  Synthesized
gctcagggttttttgcctcgtcatgctgctcag

SEQ ID NO: 5322 - DNA, 33 bp, Artificial Sequence
  Synthesized
gctcagggttttttgcctcgtaatactgctcag

SEQ ID NO: 5323 - DNA, 33 bp, Artificial Sequence
  Synthesized
gctcagggttttaatactaagtctgctgctcag

SEQ ID NO: 5324 - DNA, 33 bp, Artificial Sequence
  Synthesized
gctcagggtttttctcgtgattctactgctcag

SEQ ID NO: 5325 - DNA, 33 bp, Artificial Sequence
  Synthesized
gctcagggtggtggtgttcgtgatcgtgctcag

SEQ ID NO: 5326 - DNA, 33 bp, Artificial Sequence
  Synthesized
gctcagggtggtattgagcgttctcgtgctcag

SEQ ID NO: 5327 - DNA, 33 bp, Artificial Sequence
  Synthesized
gctcagggtggtaagcctcagcaggttgctcag

SEQ ID NO: 5328 - DNA, 33 bp, Artificial Sequence
  Synthesized
gctcagggtggtttgcctggtaagcaggctcag

SEQ ID NO: 5329 - DNA, 33 bp, Artificial Sequence
  Synthesized
gctcagggtggtttgcctcgtgctttggctcag

SEQ ID NO: 5330 - DNA, 33 bp, Artificial Sequence
  Synthesized
gctcagggtggtttgcctcgtattaaggctcag

SEQ ID NO: 5331 - DNA, 33 bp, Artificial Sequence
  Synthesized
gctcagggtggtttgcctcgtaagtctgctcag

SEQ ID NO: 5332 - DNA, 33 bp, Artificial Sequence
  Synthesized
gctcagggtggtttgcctcgtcagaaggctcag

SEQ ID NO: 5333 - DNA, 33 bp, Artificial Sequence
  Synthesized
gctcagggtggtttgcctcgtacttatgctcag

SEQ ID NO: 5334 - DNA, 33 bp, Artificial Sequence
  Synthesized
gctcagggtggtttgccttatcattctgctcag

SEQ ID NO: 5335 - DNA, 33 bp, Artificial Sequence
  Synthesized
gctcagggtggtatgcagaatcgtaatgctcag

SEQ ID NO: 5336 - DNA, 33 bp, Artificial Sequence
  Synthesized
gctcagggtggtcctccttctgctatggctcag

SEQ ID NO: 5337 - DNA, 33 bp, Artificial Sequence
  Synthesized
gctcagggtggtccttatcctaagatggctcag

SEQ ID NO: 5338 - DNA, 33 bp, Artificial Sequence
  Synthesized
gctcagggtggtcgtatttctttggatgctcag

SEQ ID NO: 5339 - DNA, 33 bp, Artificial Sequence
  Synthesized
gctcagggtggttctactgttattcgtgctcag

SEQ ID NO: 5340 - DNA, 33 bp, Artificial Sequence
  Synthesized
gctcagggtggtactaagccttctatggctcag

SEQ ID NO: 5341 - DNA, 33 bp, Artificial Sequence
  Synthesized
gctcagggtggttattcttctgctatggctcag

SEQ ID NO: 5342 - DNA, 33 bp, Artificial Sequence
  Synthesized
gctcagggtggttattcttcttctaatgctcag

SEQ ID NO: 5343 - DNA, 33 bp, Artificial Sequence
  Synthesized
gctcagggtcatgctccttcttttatggctcag

SEQ ID NO: 5344 - DNA, 33 bp, Artificial Sequence
  Synthesized
gctcagggtcattttgaggtttctcgtgctcag

SEQ ID NO: 5345 - DNA, 33 bp, Artificial Sequence
  Synthesized
gctcagggtcatggtattgctcctatggctcag

SEQ ID NO: 5346 - DNA, 33 bp, Artificial Sequence
  Synthesized
gctcagggtcatggtttgcctactattgctcag

SEQ ID NO: 5347 - DNA, 33 bp, Artificial Sequence
  Synthesized
gctcagggtcatcataattctgctatggctcag

SEQ ID NO: 5348 - DNA, 33 bp, Artificial Sequence
  Synthesized
gctcagggtcataagttgtcttttatggctcag

SEQ ID NO: 5349 - DNA, 33 bp, Artificial Sequence
  Synthesized
gctcagggtcataaggtttctgatcgtgctcag

SEQ ID NO: 5350 - DNA, 33 bp, Artificial Sequence
  Synthesized
gctcagggtcatttgcctgctccttctgctcag

SEQ ID NO: 5351 - DNA, 33 bp, Artificial Sequence
  Synthesized
gctcagggtcatttgcctaagttgtttgctcag

SEQ ID NO: 5352 - DNA, 33 bp, Artificial Sequence
  Synthesized
gctcagggtcatttgcctcagggtcatgctcag

SEQ ID NO: 5353 - DNA, 33 bp, Artificial Sequence
  Synthesized
gctcagggtcatttgcctactggtgttgctcag

SEQ ID NO: 5354 - DNA, 33 bp, Artificial Sequence
  Synthesized
gctcagggtcattctaagtattcttctgctcag

SEQ ID NO: 5355 - DNA, 33 bp, Artificial Sequence
  Synthesized
gctcagggtcattctccttctaataaggctcag

SEQ ID NO: 5356 - DNA, 33 bp, Artificial Sequence
  Synthesized
gctcagggtcattctgttaagttgcctgctcag

SEQ ID NO: 5357 - DNA, 33 bp, Artificial Sequence
  Synthesized
gctcagggtcatgttatttctcgtgatgctcag

SEQ ID NO: 5358 - DNA, 33 bp, Artificial Sequence
  Synthesized
gctcagggtattgctcgttctacttctgctcag

SEQ ID NO: 5359 - DNA, 33 bp, Artificial Sequence
  Synthesized
gctcagggtattggtttgggtcgtgatgctcag

SEQ ID NO: 5360 - DNA, 33 bp, Artificial Sequence
  Synthesized
gctcagggtattcattattctgctatggctcag

SEQ ID NO: 5361 - DNA, 33 bp, Artificial Sequence
  Synthesized
gctcagggtattaagttgcctactcctgctcag

SEQ ID NO: 5362 - DNA, 33 bp, Artificial Sequence
  Synthesized
gctcagggtattttgcctaatcgttctgctcag

SEQ ID NO: 5363 - DNA, 33 bp, Artificial Sequence
  Synthesized
gctcagggtattttgcctcgtcatcgtgctcag

SEQ ID NO: 5364 - DNA, 33 bp, Artificial Sequence
  Synthesized
gctcagggtattaatcagtctgctattgctcag

SEQ ID NO: 5365 - DNA, 33 bp, Artificial Sequence
  Synthesized
gctcagggtattcctgcttctgctatggctcag

SEQ ID NO: 5366 - DNA, 33 bp, Artificial Sequence
  Synthesized
gctcagggtatttctgctcagcctcgtgctcag

SEQ ID NO: 5367 - DNA, 33 bp, Artificial Sequence
  Synthesized
gctcagggtatttctgttaatcgtgctgctcag

SEQ ID NO: 5368 - DNA, 33 bp, Artificial Sequence
  Synthesized
gctcagggtatttatgcttctgctatggctcag

SEQ ID NO: 5369 - DNA, 33 bp, Artificial Sequence
  Synthesized
gctcagggtatttatacttcttttatggctcag

SEQ ID NO: 5370 - DNA, 33 bp, Artificial Sequence
  Synthesized
gctcagggtaagggtatttctgtttctgctcag

SEQ ID NO: 5371 - DNA, 33 bp, Artificial Sequence
  Synthesized
gctcagggtaagttgaagcgtgatatggctcag

SEQ ID NO: 5372 - DNA, 33 bp, Artificial Sequence
  Synthesized
gctcagggtaagatgactaataataatgctcag

SEQ ID NO: 5373 - DNA, 33 bp, Artificial Sequence
  Synthesized
gctcagggtaagaatcaggtttcttctgctcag

SEQ ID NO: 5374 - DNA, 33 bp, Artificial Sequence
  Synthesized
gctcagggtaagcctgagcatttgcgtgctcag

SEQ ID NO: 5375 - DNA, 33 bp, Artificial Sequence
  Synthesized
gctcagggtaagcagatgtctttgtctgctcag

SEQ ID NO: 5376 - DNA, 33 bp, Artificial Sequence
  Synthesized
gctcagggtaagtctgctatgtctcctgctcag

SEQ ID NO: 5377 - DNA, 33 bp, Artificial Sequence
  Synthesized
gctcagggtaagtctttgtcttctcatgctcag

SEQ ID NO: 5378 - DNA, 33 bp, Artificial Sequence
  Synthesized
gctcagggtaagactgctaatactttggctcag

SEQ ID NO: 5379 - DNA, 33 bp, Artificial Sequence
  Synthesized
gctcagggtaagactaatttgttgcaggctcag

SEQ ID NO: 5380 - DNA, 33 bp, Artificial Sequence
  Synthesized
gctcagggtaagacttattcttttatggctcag

SEQ ID NO: 5381 - DNA, 33 bp, Artificial Sequence
  Synthesized
gctcagggtaagtatggttctgctatggctcag

SEQ ID NO: 5382 - DNA, 33 bp, Artificial Sequence
  Synthesized
gctcagggtttgggtaagttgtctgaggctcag

SEQ ID NO: 5383 - DNA, 33 bp, Artificial Sequence
  Synthesized
gctcagggtttgggtcgtacttcttctgctcag

SEQ ID NO: 5384 - DNA, 33 bp, Artificial Sequence
  Synthesized
gctcagggtttgattggtaataagtctgctcag

SEQ ID NO: 5385 - DNA, 33 bp, Artificial Sequence
  Synthesized
gctcagggtttgaagggttctgctatggctcag

SEQ ID NO: 5386 - DNA, 33 bp, Artificial Sequence
  Synthesized
gctcagggtttgaagactatgactattgctcag

SEQ ID NO: 5387 - DNA, 33 bp, Artificial Sequence
  Synthesized
gctcagggtttgttgttggctcctcatgctcag

SEQ ID NO: 5388 - DNA, 33 bp, Artificial Sequence
  Synthesized
gctcagggtttgttgcctgttatgggtgctcag

SEQ ID NO: 5389 - DNA, 33 bp, Artificial Sequence
  Synthesized
gctcagggtttgttgactactcagggtgctcag

SEQ ID NO: 5390 - DNA, 33 bp, Artificial Sequence
  Synthesized
gctcagggtttgatgtctcctgctgctgctcag

SEQ ID NO: 5391 - DNA, 33 bp, Artificial Sequence
  Synthesized
gctcagggtttgtctggtttgcgtcaggctcag

SEQ ID NO: 5392 - DNA, 33 bp, Artificial Sequence
  Synthesized
gctcagggtttgtctttgaatcctcaggctcag

SEQ ID NO: 5393 - DNA, 33 bp, Artificial Sequence
  Synthesized
gctcagggtttgtctatgtcttctggtgctcag

SEQ ID NO: 5394 - DNA, 33 bp, Artificial Sequence
  Synthesized
gctcagggtttgtctaattatcagtctgctcag

SEQ ID NO: 5395 - DNA, 33 bp, Artificial Sequence
  Synthesized
gctcagggtttgtcttctactcgtaatgctcag

SEQ ID NO: 5396 - DNA, 33 bp, Artificial Sequence
  Synthesized
gctcagggtttgactcgtcaggctcaggctcag

SEQ ID NO: 5397 - DNA, 33 bp, Artificial Sequence
  Synthesized
gctcagggtttggttcaggctcctgctgctcag

SEQ ID NO: 5398 - DNA, 33 bp, Artificial Sequence
  Synthesized
gctcagggtttgtataatcgtcctatggctcag

SEQ ID NO: 5399 - DNA, 33 bp, Artificial Sequence
  Synthesized
gctcagggtatgggtggttcttttatggctcag

SEQ ID NO: 5400 - DNA, 33 bp, Artificial Sequence
  Synthesized
gctcagggtatgcatggttctgagttggctcag

SEQ ID NO: 5401 - DNA, 33 bp, Artificial Sequence
  Synthesized
gctcagggtatgaagtcttcttctttggctcag

SEQ ID NO: 5402 - DNA, 33 bp, Artificial Sequence
  Synthesized
gctcagggtatgttgcctcctcctcatgctcag

SEQ ID NO: 5403 - DNA, 33 bp, Artificial Sequence
  Synthesized
gctcagggtatgttgcctcgtattcgtgctcag

SEQ ID NO: 5404 - DNA, 33 bp, Artificial Sequence
  Synthesized
gctcagggtatgttgcctcgtcgtatggctcag

SEQ ID NO: 5405 - DNA, 33 bp, Artificial Sequence
  Synthesized
gctcagggtatgaatcgttctgttcaggctcag

SEQ ID NO: 5406 - DNA, 33 bp, Artificial Sequence
  Synthesized
gctcagggtatgaatacttctttgattgctcag

SEQ ID NO: 5407 - DNA, 33 bp, Artificial Sequence
  Synthesized
gctcagggtatgcctcgttctcctaatgctcag

SEQ ID NO: 5408 - DNA, 33 bp, Artificial Sequence
  Synthesized
gctcagggtaatgctgttgctcgtaatgctcag

SEQ ID NO: 5409 - DNA, 33 bp, Artificial Sequence
  Synthesized
gctcagggtaatgctgttaaggatcatgctcag

SEQ ID NO: 5410 - DNA, 33 bp, Artificial Sequence
  Synthesized
gctcagggtaatgatgttcgtactcgtgctcag

SEQ ID NO: 5411 - DNA, 33 bp, Artificial Sequence
  Synthesized
gctcagggtaattttactcgtcataatgctcag

SEQ ID NO: 5412 - DNA, 33 bp, Artificial Sequence
  Synthesized
gctcagggtaattttactcgtatttatgctcag

SEQ ID NO: 5413 - DNA, 33 bp, Artificial Sequence
  Synthesized
gctcagggtaattttactcgtaagggtgctcag

SEQ ID NO: 5414 - DNA, 33 bp, Artificial Sequence
  Synthesized
gctcagggtaatggtactcgtgctcaggctcag

SEQ ID NO: 5415 - DNA, 33 bp, Artificial Sequence
  Synthesized
gctcagggtaatggtactcgttttcatgctcag

SEQ ID NO: 5416 - DNA, 33 bp, Artificial Sequence
  Synthesized
gctcagggtaatggtactcgtactaaggctcag

SEQ ID NO: 5417 - DNA, 33 bp, Artificial Sequence
  Synthesized
gctcagggtaatcatactcgtcatgctgctcag

SEQ ID NO: 5418 - DNA, 33 bp, Artificial Sequence
  Synthesized
gctcagggtaatcatactcgtcatcgtgctcag

SEQ ID NO: 5419 - DNA, 33 bp, Artificial Sequence
  Synthesized
gctcagggtaatcatactcgtcctcctgctcag

SEQ ID NO: 5420 - DNA, 33 bp, Artificial Sequence
  Synthesized
gctcagggtaatcatactcgtcgtaatgctcag

SEQ ID NO: 5421 - DNA, 33 bp, Artificial Sequence
  Synthesized
gctcagggtaataagactcgtggtgaggctcag

SEQ ID NO: 5422 - DNA, 33 bp, Artificial Sequence
  Synthesized
gctcagggtaataagactcgtggtcgtgctcag

SEQ ID NO: 5423 - DNA, 33 bp, Artificial Sequence
  Synthesized
gctcagggtaatttgactaagactgttgctcag

SEQ ID NO: 5424 - DNA, 33 bp, Artificial Sequence
  Synthesized
gctcagggtaatatgactcgtcatggtgctcag

SEQ ID NO: 5425 - DNA, 33 bp, Artificial Sequence
  Synthesized
gctcagggtaatatgactcgttatggtgctcag

SEQ ID NO: 5426 - DNA, 33 bp, Artificial Sequence
  Synthesized
gctcagggtaataatacttttggttatgctcag

SEQ ID NO: 5427 - DNA, 33 bp, Artificial Sequence
  Synthesized
gctcagggtaataatacttttcattatgctcag

SEQ ID NO: 5428 - DNA, 33 bp, Artificial Sequence
  Synthesized
gctcagggtaataatactggtgaggatgctcag

SEQ ID NO: 5429 - DNA, 33 bp, Artificial Sequence
  Synthesized
gctcagggtaataatactggtcatcatgctcag

SEQ ID NO: 5430 - DNA, 33 bp, Artificial Sequence
  Synthesized
gctcagggtaataatactcatccttttgctcag

SEQ ID NO: 5431 - DNA, 33 bp, Artificial Sequence
  Synthesized
gctcagggtaataatactattggttttgctcag

SEQ ID NO: 5432 - DNA, 33 bp, Artificial Sequence
  Synthesized
gctcagggtaataatactaagcgtcatgctcag

SEQ ID NO: 5433 - DNA, 33 bp, Artificial Sequence
  Synthesized
gctcagggtaataatactttgtattatgctcag

SEQ ID NO: 5434 - DNA, 33 bp, Artificial Sequence
  Synthesized
gctcagggtaataatactccttttgatgctcag

SEQ ID NO: 5435 - DNA, 33 bp, Artificial Sequence
  Synthesized
gctcagggtaataatacttatggtggtgctcag

SEQ ID NO: 5436 - DNA, 33 bp, Artificial Sequence
  Synthesized
gctcagggtaataatacttatcagcgtgctcag

SEQ ID NO: 5437 - DNA, 33 bp, Artificial Sequence
  Synthesized
gctcagggtaatcctgctattaattctgctcag

SEQ ID NO: 5438 - DNA, 33 bp, Artificial Sequence
  Synthesized
gctcagggtaatcctgctaagttgtctgctcag

SEQ ID NO: 5439 - DNA, 33 bp, Artificial Sequence
  Synthesized
gctcagggtaatcctgagatgatttctgctcag

SEQ ID NO: 5440 - DNA, 33 bp, Artificial Sequence
  Synthesized
gctcagggtaatccttttactgattctgctcag

SEQ ID NO: 5441 - DNA, 33 bp, Artificial Sequence
  Synthesized
gctcagggtaatccttttactacttctgctcag

SEQ ID NO: 5442 - DNA, 33 bp, Artificial Sequence
  Synthesized
gctcagggtaatcctaagaagggttctgctcag

SEQ ID NO: 5443 - DNA, 33 bp, Artificial Sequence
  Synthesized
gctcagggtaatcctttgcgtgcttctgctcag

SEQ ID NO: 5444 - DNA, 33 bp, Artificial Sequence
  Synthesized
gctcagggtaatcctcctattggttctgctcag

SEQ ID NO: 5445 - DNA, 33 bp, Artificial Sequence
  Synthesized
gctcagggtaatcctcctcctatttctgctcag

SEQ ID NO: 5446 - DNA, 33 bp, Artificial Sequence
  Synthesized
gctcagggtaatcctcgtatgccttctgctcag

SEQ ID NO: 5447 - DNA, 33 bp, Artificial Sequence
  Synthesized
gctcagggtaatcctactcgtaagactgctcag

SEQ ID NO: 5448 - DNA, 33 bp, Artificial Sequence
  Synthesized
gctcagggtaatcctgttttgcgttctgctcag

SEQ ID NO: 5449 - DNA, 33 bp, Artificial Sequence
  Synthesized
gctcagggtaatcctgttaatcgttctgctcag

SEQ ID NO: 5450 - DNA, 33 bp, Artificial Sequence
  Synthesized
gctcagggtaatcctgttcctcgttctgctcag

SEQ ID NO: 5451 - DNA, 33 bp, Artificial Sequence
  Synthesized
gctcagggtaatcctgttgttcgttctgctcag

SEQ ID NO: 5452 - DNA, 33 bp, Artificial Sequence
  Synthesized
gctcagggtaatcctgtttatcgttctgctcag

SEQ ID NO: 5453 - DNA, 33 bp, Artificial Sequence
  Synthesized
gctcagggtaatccttatttgtcttctgctcag

SEQ ID NO: 5454 - DNA, 33 bp, Artificial Sequence
  Synthesized
gctcagggtaatcagaaggttggtttggctcag

SEQ ID NO: 5455 - DNA, 33 bp, Artificial Sequence
  Synthesized
gctcagggtaatcagttgaagaatactgctcag

SEQ ID NO: 5456 - DNA, 33 bp, Artificial Sequence
  Synthesized
gctcagggtaatcagactcgtccttatgctcag

SEQ ID NO: 5457 - DNA, 33 bp, Artificial Sequence
  Synthesized
gctcagggtaatcgtactcgtcatcatgctcag

SEQ ID NO: 5458 - DNA, 33 bp, Artificial Sequence
  Synthesized
gctcagggtaatcgtactcgtaattttgctcag

SEQ ID NO: 5459 - DNA, 33 bp, Artificial Sequence
  Synthesized
gctcagggtaatcgtactcgttatactgctcag

SEQ ID NO: 5460 - DNA, 33 bp, Artificial Sequence
  Synthesized
gctcagggtaattcttctaagaatttggctcag

SEQ ID NO: 5461 - DNA, 33 bp, Artificial Sequence
  Synthesized
gctcagggtaattcttctaatcctcgtgctcag

SEQ ID NO: 5462 - DNA, 33 bp, Artificial Sequence
  Synthesized
gctcagggtaattctgttaaggattctgctcag

SEQ ID NO: 5463 - DNA, 33 bp, Artificial Sequence
  Synthesized
gctcagggtaatactactttgcgtttggctcag

SEQ ID NO: 5464 - DNA, 33 bp, Artificial Sequence
  Synthesized
gctcagggtaatactactttgcgttctgctcag

SEQ ID NO: 5465 - DNA, 33 bp, Artificial Sequence
  Synthesized
gctcagggtaatactactcgtcctattgctcag

SEQ ID NO: 5466 - DNA, 33 bp, Artificial Sequence
  Synthesized
gctcagggtaatactgttgctaaggttgctcag

SEQ ID NO: 5467 - DNA, 33 bp, Artificial Sequence
  Synthesized
gctcagggtaatgttactcgtattcgtgctcag

SEQ ID NO: 5468 - DNA, 33 bp, Artificial Sequence
  Synthesized
gctcagggtaatgttactcgtaatcaggctcag

SEQ ID NO: 5469 - DNA, 33 bp, Artificial Sequence
  Synthesized
gctcagggtaattatactcgtcatatggctcag

SEQ ID NO: 5470 - DNA, 33 bp, Artificial Sequence
  Synthesized
gctcagggtaattatactcgtactcctgctcag

SEQ ID NO: 5471 - DNA, 33 bp, Artificial Sequence
  Synthesized
gctcagggtcctgctaagtctgctatggctcag

SEQ ID NO: 5472 - DNA, 33 bp, Artificial Sequence
  Synthesized
gctcagggtcctgatcgtatgaagattgctcag

SEQ ID NO: 5473 - DNA, 33 bp, Artificial Sequence
  Synthesized
gctcagggtcctggtgatcagttgaatgctcag

SEQ ID NO: 5474 - DNA, 33 bp, Artificial Sequence
  Synthesized
gctcagggtcctcatacttcttttatggctcag

SEQ ID NO: 5475 - DNA, 33 bp, Artificial Sequence
  Synthesized
gctcagggtcctttgcctgatttgcgtgctcag

SEQ ID NO: 5476 - DNA, 33 bp, Artificial Sequence
  Synthesized
gctcagggtcctttgcctcgtcattttgctcag

SEQ ID NO: 5477 - DNA, 33 bp, Artificial Sequence
  Synthesized
gctcagggtcctttgtctcgtcagcctgctcag

SEQ ID NO: 5478 - DNA, 33 bp, Artificial Sequence
  Synthesized
gctcagggtcctcagttgtctgctatggctcag

SEQ ID NO: 5479 - DNA, 33 bp, Artificial Sequence
  Synthesized
gctcagggtcctcgtcctggtaatattgctcag

SEQ ID NO: 5480 - DNA, 33 bp, Artificial Sequence
  Synthesized
gctcagggtccttctactcatgatttggctcag

SEQ ID NO: 5481 - DNA, 33 bp, Artificial Sequence
  Synthesized
gctcagggtcctgttccttcttttatggctcag

SEQ ID NO: 5482 - DNA, 33 bp, Artificial Sequence
  Synthesized
gctcagggtcctgttcagcgtaatgttgctcag

SEQ ID NO: 5483 - DNA, 33 bp, Artificial Sequence
  Synthesized
gctcagggtcctgttcaggttcctactgctcag

SEQ ID NO: 5484 - DNA, 33 bp, Artificial Sequence
  Synthesized
gctcagggtcctgtttcttcttttgctgctcag

SEQ ID NO: 5485 - DNA, 33 bp, Artificial Sequence
  Synthesized
gctcagggtcaggcttctacttctttggctcag

SEQ ID NO: 5486 - DNA, 33 bp, Artificial Sequence
  Synthesized
gctcagggtcagttttcttcttttatggctcag

SEQ ID NO: 5487 - DNA, 33 bp, Artificial Sequence
  Synthesized
gctcagggtcagggtcgtaatatgactgctcag

SEQ ID NO: 5488 - DNA, 33 bp, Artificial Sequence
  Synthesized
gctcagggtcagatgaagcagacttttgctcag

SEQ ID NO: 5489 - DNA, 33 bp, Artificial Sequence
  Synthesized
gctcagggtcagatgtctcctatgttggctcag

SEQ ID NO: 5490 - DNA, 33 bp, Artificial Sequence
  Synthesized
gctcagggtcagcctattgttaataatgctcag

SEQ ID NO: 5491 - DNA, 33 bp, Artificial Sequence
  Synthesized
gctcagggtcagcgtgctactttgactgctcag

SEQ ID NO: 5492 - DNA, 33 bp, Artificial Sequence
  Synthesized
gctcagggtcagcgtatgttggcttctgctcag

SEQ ID NO: 5493 - DNA, 33 bp, Artificial Sequence
  Synthesized
gctcagggtcagcgtcctcaggttcaggctcag

SEQ ID NO: 5494 - DNA, 33 bp, Artificial Sequence
  Synthesized
gctcagggtcagcgttcttctttgtctgctcag

SEQ ID NO: 5495 - DNA, 33 bp, Artificial Sequence
  Synthesized
gctcagggtcagtctgatgttttgaaggctcag

SEQ ID NO: 5496 - DNA, 33 bp, Artificial Sequence
  Synthesized
gctcagggtcaggttactaatcgtactgctcag

SEQ ID NO: 5497 - DNA, 33 bp, Artificial Sequence
  Synthesized
gctcagggtcgtgctttgactgctactgctcag

SEQ ID NO: 5498 - DNA, 33 bp, Artificial Sequence
  Synthesized
gctcagggtcgtgcttctatgacttctgctcag

SEQ ID NO: 5499 - DNA, 33 bp, Artificial Sequence
  Synthesized
gctcagggtcgtgctgttgttactggtgctcag

SEQ ID NO: 5500 - DNA, 33 bp, Artificial Sequence
  Synthesized
gctcagggtcgtgatcattctgttcaggctcag

SEQ ID NO: 5501 - DNA, 33 bp, Artificial Sequence
  Synthesized
gctcagggtcgtggtatgtcttctcaggctcag

SEQ ID NO: 5502 - DNA, 33 bp, Artificial Sequence
  Synthesized
gctcagggtcgtggttctttgaatcaggctcag

SEQ ID NO: 5503 - DNA, 33 bp, Artificial Sequence
  Synthesized
gctcagggtcgtggtgttcatactgaggctcag

SEQ ID NO: 5504 - DNA, 33 bp, Artificial Sequence
  Synthesized
gctcagggtcgtcatatggagcagttggctcag

SEQ ID NO: 5505 - DNA, 33 bp, Artificial Sequence
  Synthesized
gctcagggtcgtttgcatattggtgaggctcag

SEQ ID NO: 5506 - DNA, 33 bp, Artificial Sequence
  Synthesized
gctcagggtcgtttgaatgttactactgctcag

SEQ ID NO: 5507 - DNA, 33 bp, Artificial Sequence
  Synthesized
gctcagggtcgtttgcctaattttcctgctcag

SEQ ID NO: 5508 - DNA, 33 bp, Artificial Sequence
  Synthesized
gctcagggtcgtttgccttctgctatggctcag

SEQ ID NO: 5509 - DNA, 33 bp, Artificial Sequence
  Synthesized
gctcagggtcgtatgtcttctttggctgctcag

SEQ ID NO: 5510 - DNA, 33 bp, Artificial Sequence
  Synthesized
gctcagggtcgtaatggtttgatggttgctcag

SEQ ID NO: 5511 - DNA, 33 bp, Artificial Sequence
  Synthesized
gctcagggtcgtcctggtgctcagttggctcag

SEQ ID NO: 5512 - DNA, 33 bp, Artificial Sequence
  Synthesized
gctcagggtcgtcaggcttatgcttctgctcag

SEQ ID NO: 5513 - DNA, 33 bp, Artificial Sequence
  Synthesized
gctcagggtcgtcagttgttgccttctgctcag

SEQ ID NO: 5514 - DNA, 33 bp, Artificial Sequence
  Synthesized
gctcagggtcgttctgagacttatttggctcag

SEQ ID NO: 5515 - DNA, 33 bp, Artificial Sequence
  Synthesized
gctcagggtcgttctttttcttttatggctcag

SEQ ID NO: 5516 - DNA, 33 bp, Artificial Sequence
  Synthesized
gctcagggtcgttctggtactgctactgctcag

SEQ ID NO: 5517 - DNA, 33 bp, Artificial Sequence
  Synthesized
gctcagggtcgttctatggctaatcaggctcag

SEQ ID NO: 5518 - DNA, 33 bp, Artificial Sequence
  Synthesized
gctcagggtcgttctcaggctcctcaggctcag

SEQ ID NO: 5519 - DNA, 33 bp, Artificial Sequence
  Synthesized
gctcagggtcgttcttctcagggtgaggctcag

SEQ ID NO: 5520 - DNA, 33 bp, Artificial Sequence
  Synthesized
gctcagggtcgttcttctgttttgcctgctcag

SEQ ID NO: 5521 - DNA, 33 bp, Artificial Sequence
  Synthesized
gctcagggtcgttctactttgcctgatgctcag

SEQ ID NO: 5522 - DNA, 33 bp, Artificial Sequence
  Synthesized
gctcagggtcgtactggtatgtctcctgctcag

SEQ ID NO: 5523 - DNA, 33 bp, Artificial Sequence
  Synthesized
gctcagggtcgtactggtgttggtgttgctcag

SEQ ID NO: 5524 - DNA, 33 bp, Artificial Sequence
  Synthesized
gctcagggtcgtacttctattcgtgaggctcag

SEQ ID NO: 5525 - DNA, 33 bp, Artificial Sequence
  Synthesized
gctcagggtcgtgttgatactatgatggctcag

SEQ ID NO: 5526 - DNA, 33 bp, Artificial Sequence
  Synthesized
gctcagggtcgtgttcctgctgctaatgctcag

SEQ ID NO: 5527 - DNA, 33 bp, Artificial Sequence
  Synthesized
gctcagggttctgcttctgttcgtaatgctcag

SEQ ID NO: 5528 - DNA, 33 bp, Artificial Sequence
  Synthesized
gctcagggttctgatcctgctcgttttgctcag

SEQ ID NO: 5529 - DNA, 33 bp, Artificial Sequence
  Synthesized
gctcagggttctgagattcgtactgttgctcag

SEQ ID NO: 5530 - DNA, 33 bp, Artificial Sequence
  Synthesized
gctcagggttctggtttgcgtgcttatgctcag

SEQ ID NO: 5531 - DNA, 33 bp, Artificial Sequence
  Synthesized
gctcagggttctggtcgtaatgttggtgctcag

SEQ ID NO: 5532 - DNA, 33 bp, Artificial Sequence
  Synthesized
gctcagggttctaagcatttgcctcaggctcag

SEQ ID NO: 5533 - DNA, 33 bp, Artificial Sequence
  Synthesized
gctcagggttctaagtctgatttgcaggctcag

SEQ ID NO: 5534 - DNA, 33 bp, Artificial Sequence
  Synthesized
gctcagggttctttgttggctactaaggctcag

SEQ ID NO: 5535 - DNA, 33 bp, Artificial Sequence
  Synthesized
gctcagggttctttgcctttggattctgctcag

SEQ ID NO: 5536 - DNA, 33 bp, Artificial Sequence
  Synthesized
gctcagggttctttgcctcgtcataaggctcag

SEQ ID NO: 5537 - DNA, 33 bp, Artificial Sequence
  Synthesized
gctcagggttctttgcctgtttctgatgctcag

SEQ ID NO: 5538 - DNA, 33 bp, Artificial Sequence
  Synthesized
gctcagggttctatgaagacttttcaggctcag

SEQ ID NO: 5539 - DNA, 33 bp, Artificial Sequence
  Synthesized
gctcagggttctaatcgtgttcagcatgctcag

SEQ ID NO: 5540 - DNA, 33 bp, Artificial Sequence
  Synthesized
gctcagggttctaatgttgaggagttggctcag

SEQ ID NO: 5541 - DNA, 33 bp, Artificial Sequence
  Synthesized
gctcagggttctcagcgtactcctgaggctcag

SEQ ID NO: 5542 - DNA, 33 bp, Artificial Sequence
  Synthesized
gctcagggttctcgtggtacttctcctgctcag

SEQ ID NO: 5543 - DNA, 33 bp, Artificial Sequence
  Synthesized
gctcagggttctcgtatttcttctactgctcag

SEQ ID NO: 5544 - DNA, 33 bp, Artificial Sequence
  Synthesized
gctcagggttctcgttctggtactttggctcag

SEQ ID NO: 5545 - DNA, 33 bp, Artificial Sequence
  Synthesized
gctcagggttctcgttctgttttgggtgctcag

SEQ ID NO: 5546 - DNA, 33 bp, Artificial Sequence
  Synthesized
gctcagggttcttctatgcgttcttctgctcag

SEQ ID NO: 5547 - DNA, 33 bp, Artificial Sequence
  Synthesized
gctcagggttcttctgttttgaagtctgctcag

SEQ ID NO: 5548 - DNA, 33 bp, Artificial Sequence
  Synthesized
gctcagggttctactggtcgtgataaggctcag

SEQ ID NO: 5549 - DNA, 33 bp, Artificial Sequence
  Synthesized
gctcagggttctactggtcgtgttttggctcag

SEQ ID NO: 5550 - DNA, 33 bp, Artificial Sequence
  Synthesized
gctcagggttctactcctattactcgtgctcag

SEQ ID NO: 5551 - DNA, 33 bp, Artificial Sequence
  Synthesized
gctcagggttctacttctcgtgctaatgctcag

SEQ ID NO: 5552 - DNA, 33 bp, Artificial Sequence
  Synthesized
gctcagggttctgtttatcgtgattctgctcag

SEQ ID NO: 5553 - DNA, 33 bp, Artificial Sequence
  Synthesized
gctcagggttcttatgcttctcctttggctcag

SEQ ID NO: 5554 - DNA, 33 bp, Artificial Sequence
  Synthesized
gctcagggttcttatggtggtcagaatgctcag

SEQ ID NO: 5555 - DNA, 33 bp, Artificial Sequence
  Synthesized
gctcagggttcttattctcattctgaggctcag

SEQ ID NO: 5556 - DNA, 33 bp, Artificial Sequence
  Synthesized
gctcagggtactggtgctcgtcctactgctcag

SEQ ID NO: 5557 - DNA, 33 bp, Artificial Sequence
  Synthesized
gctcagggtactaagcagtctttgtctgctcag

SEQ ID NO: 5558 - DNA, 33 bp, Artificial Sequence
  Synthesized
gctcagggtactttgggttatgctgctgctcag

SEQ ID NO: 5559 - DNA, 33 bp, Artificial Sequence
  Synthesized
gctcagggtactttgcctcgtccttatgctcag

SEQ ID NO: 5560 - DNA, 33 bp, Artificial Sequence
  Synthesized
gctcagggtactatgggtttggctaatgctcag

SEQ ID NO: 5561 - DNA, 33 bp, Artificial Sequence
  Synthesized
gctcagggtactaatgctaatcgtactgctcag

SEQ ID NO: 5562 - DNA, 33 bp, Artificial Sequence
  Synthesized
gctcagggtactcgtggtcagatggttgctcag

SEQ ID NO: 5563 - DNA, 33 bp, Artificial Sequence
  Synthesized
gctcagggtactcgtcctgttgctcctgctcag

SEQ ID NO: 5564 - DNA, 33 bp, Artificial Sequence
  Synthesized
gctcagggtactcgttctactggtggtgctcag

SEQ ID NO: 5565 - DNA, 33 bp, Artificial Sequence
  Synthesized
gctcagggtacttctcctatgcgtcctgctcag

SEQ ID NO: 5566 - DNA, 33 bp, Artificial Sequence
  Synthesized
gctcagggtactactggtaagtctactgctcag

SEQ ID NO: 5567 - DNA, 33 bp, Artificial Sequence
  Synthesized
gctcagggtacttataagtcttttatggctcag

SEQ ID NO: 5568 - DNA, 33 bp, Artificial Sequence
  Synthesized
gctcagggtgttgctggtgttcgtattgctcag

SEQ ID NO: 5569 - DNA, 33 bp, Artificial Sequence
  Synthesized
gctcagggtgttgctcgtcagaatactgctcag

SEQ ID NO: 5570 - DNA, 33 bp, Artificial Sequence
  Synthesized
gctcagggtgttgagtctttgactcctgctcag

SEQ ID NO: 5571 - DNA, 33 bp, Artificial Sequence
  Synthesized
gctcagggtgttggtaatactactcgtgctcag

SEQ ID NO: 5572 - DNA, 33 bp, Artificial Sequence
  Synthesized
gctcagggtgttggtactttgtcttctgctcag

SEQ ID NO: 5573 - DNA, 33 bp, Artificial Sequence
  Synthesized
gctcagggtgttcatgataattctcaggctcag

SEQ ID NO: 5574 - DNA, 33 bp, Artificial Sequence
  Synthesized
gctcagggtgttaaggtttctcagttggctcag

SEQ ID NO: 5575 - DNA, 33 bp, Artificial Sequence
  Synthesized
gctcagggtgttttggctcatcctaaggctcag

SEQ ID NO: 5576 - DNA, 33 bp, Artificial Sequence
  Synthesized
gctcagggtgttttgaatcgtgagtctgctcag

SEQ ID NO: 5577 - DNA, 33 bp, Artificial Sequence
  Synthesized
gctcagggtgttttgcctcgtactatggctcag

SEQ ID NO: 5578 - DNA, 33 bp, Artificial Sequence
  Synthesized
gctcagggtgttttgcagttgactgctgctcag

SEQ ID NO: 5579 - DNA, 33 bp, Artificial Sequence
  Synthesized
gctcagggtgttttgcagttgactgaggctcag

SEQ ID NO: 5580 - DNA, 33 bp, Artificial Sequence
  Synthesized
gctcagggtgttttgtctttgaaggatgctcag

SEQ ID NO: 5581 - DNA, 33 bp, Artificial Sequence
  Synthesized
gctcagggtgttatgcgttcttttatggctcag

SEQ ID NO: 5582 - DNA, 33 bp, Artificial Sequence
  Synthesized
gctcagggtgttcctcatcagactcgtgctcag

SEQ ID NO: 5583 - DNA, 33 bp, Artificial Sequence
  Synthesized
gctcagggtgttcgtggtggtacttctgctcag

SEQ ID NO: 5584 - DNA, 33 bp, Artificial Sequence
  Synthesized
gctcagggtgttcgtaatactaattctgctcag

SEQ ID NO: 5585 - DNA, 33 bp, Artificial Sequence
  Synthesized
gctcagggtgtttctgatcgtgcttctgctcag

SEQ ID NO: 5586 - DNA, 33 bp, Artificial Sequence
  Synthesized
gctcagggtgtttctggtacttcttctgctcag

SEQ ID NO: 5587 - DNA, 33 bp, Artificial Sequence
  Synthesized
gctcagggtgttactgataagaagactgctcag

SEQ ID NO: 5588 - DNA, 33 bp, Artificial Sequence
  Synthesized
gctcagggtgttgttatttctccttctgctcag

SEQ ID NO: 5589 - DNA, 33 bp, Artificial Sequence
  Synthesized
gctcagggttatggtatgtctgctatggctcag

SEQ ID NO: 5590 - DNA, 33 bp, Artificial Sequence
  Synthesized
gctcagggttatggtgttcatcgtgaggctcag

SEQ ID NO: 5591 - DNA, 33 bp, Artificial Sequence
  Synthesized
gctcagggttatttgccttttggttctgctcag

SEQ ID NO: 5592 - DNA, 33 bp, Artificial Sequence
  Synthesized
gctcagggttatttgcctcatcataaggctcag

SEQ ID NO: 5593 - DNA, 33 bp, Artificial Sequence
  Synthesized
gctcagggttatttgcctcatcattatgctcag

SEQ ID NO: 5594 - DNA, 33 bp, Artificial Sequence
  Synthesized
gctcagggttatttgcctcgtggttctgctcag

SEQ ID NO: 5595 - DNA, 33 bp, Artificial Sequence
  Synthesized
gctcagggttatcctttttcttttatggctcag

SEQ ID NO: 5596 - DNA, 33 bp, Artificial Sequence
  Synthesized
gctcagggttattctcattcttctggtgctcag

SEQ ID NO: 5597 - DNA, 33 bp, Artificial Sequence
  Synthesized
gctcagcatgctgatcgtacttattctgctcag

SEQ ID NO: 5598 - DNA, 33 bp, Artificial Sequence
  Synthesized
gctcagcatgctgattctttgaaggctgctcag

SEQ ID NO: 5599 - DNA, 33 bp, Artificial Sequence
  Synthesized
gctcagcatgcttttttttcttttatggctcag

SEQ ID NO: 5600 - DNA, 33 bp, Artificial Sequence
  Synthesized
gctcagcatgctttgcctcgtcgtcctgctcag

SEQ ID NO: 5601 - DNA, 33 bp, Artificial Sequence
  Synthesized
gctcagcatgctcctgattcttttatggctcag

SEQ ID NO: 5602 - DNA, 33 bp, Artificial Sequence
  Synthesized
gctcagcatgctcaggctcctatggctgctcag

SEQ ID NO: 5603 - DNA, 33 bp, Artificial Sequence
  Synthesized
gctcagcatgctcagcgttctactgctgctcag

SEQ ID NO: 5604 - DNA, 33 bp, Artificial Sequence
  Synthesized
gctcagcatgctacttcttctactcaggctcag

SEQ ID NO: 5605 - DNA, 33 bp, Artificial Sequence
  Synthesized
gctcagcatgctgttacttcttttatggctcag

SEQ ID NO: 5606 - DNA, 33 bp, Artificial Sequence
  Synthesized
gctcagcatgataagccttcttttatggctcag

SEQ ID NO: 5607 - DNA, 33 bp, Artificial Sequence
  Synthesized
gctcagcatgatttgcctcataagcatgctcag

SEQ ID NO: 5608 - DNA, 33 bp, Artificial Sequence
  Synthesized
gctcagcatgatttgcctcgtcctaaggctcag

SEQ ID NO: 5609 - DNA, 33 bp, Artificial Sequence
  Synthesized
gctcagcatgatttgccttatgaggctgctcag

SEQ ID NO: 5610 - DNA, 33 bp, Artificial Sequence
  Synthesized
gctcagcatgatcgtgattatcctttggctcag

SEQ ID NO: 5611 - DNA, 33 bp, Artificial Sequence
  Synthesized
gctcagcatgattctaagttgacttatgctcag

SEQ ID NO: 5612 - DNA, 33 bp, Artificial Sequence
  Synthesized
gctcagcatgattctttgattttgtctgctcag

SEQ ID NO: 5613 - DNA, 33 bp, Artificial Sequence
  Synthesized
gctcagcatgagcataattctgctatggctcag

SEQ ID NO: 5614 - DNA, 33 bp, Artificial Sequence
  Synthesized
gctcagcatgagttgcctcgtactgctgctcag

SEQ ID NO: 5615 - DNA, 33 bp, Artificial Sequence
  Synthesized
gctcagcatgagcctcattcttttatggctcag

SEQ ID NO: 5616 - DNA, 33 bp, Artificial Sequence
  Synthesized
gctcagcatgagcctacttctttgttggctcag

SEQ ID NO: 5617 - DNA, 33 bp, Artificial Sequence
  Synthesized
gctcagcattttggtaagtcttttatggctcag

SEQ ID NO: 5618 - DNA, 33 bp, Artificial Sequence
  Synthesized
gctcagcattttttgccttttggtgctgctcag

SEQ ID NO: 5619 - DNA, 33 bp, Artificial Sequence
  Synthesized
gctcagcattttttgcctggtggtcgtgctcag

SEQ ID NO: 5620 - DNA, 33 bp, Artificial Sequence
  Synthesized
gctcagcattttttgcctcgtgagaaggctcag

SEQ ID NO: 5621 - DNA, 33 bp, Artificial Sequence
  Synthesized
gctcagcattttcctttttcttttatggctcag

SEQ ID NO: 5622 - DNA, 33 bp, Artificial Sequence
  Synthesized
gctcagcattttcgtttttctgctatggctcag

SEQ ID NO: 5623 - DNA, 33 bp, Artificial Sequence
  Synthesized
gctcagcatttttatatttcttttatggctcag

SEQ ID NO: 5624 - DNA, 33 bp, Artificial Sequence
  Synthesized
gctcagcatggtttttcttctcaggctgctcag

SEQ ID NO: 5625 - DNA, 33 bp, Artificial Sequence
  Synthesized
gctcagcatggtcatggttcttttatggctcag

SEQ ID NO: 5626 - DNA, 33 bp, Artificial Sequence
  Synthesized
gctcagcatggtttgcctgagtatcaggctcag

SEQ ID NO: 5627 - DNA, 33 bp, Artificial Sequence
  Synthesized
gctcagcatggtttgcctcattttatggctcag

SEQ ID NO: 5628 - DNA, 33 bp, Artificial Sequence
  Synthesized
gctcagcatggtttgcctcatcatcatgctcag

SEQ ID NO: 5629 - DNA, 33 bp, Artificial Sequence
  Synthesized
gctcagcatggtttgcctcgttttttggctcag

SEQ ID NO: 5630 - DNA, 33 bp, Artificial Sequence
  Synthesized
gctcagcatggtttgcctcgtcctcatgctcag

SEQ ID NO: 5631 - DNA, 33 bp, Artificial Sequence
  Synthesized
gctcagcatggtttgcctcgtcctaaggctcag

SEQ ID NO: 5632 - DNA, 33 bp, Artificial Sequence
  Synthesized
gctcagcatggtttgcctcgttatgctgctcag

SEQ ID NO: 5633 - DNA, 33 bp, Artificial Sequence
  Synthesized
gctcagcatggtatgaagggttctttggctcag

SEQ ID NO: 5634 - DNA, 33 bp, Artificial Sequence
  Synthesized
gctcagcatggtcctcatttgcctgttgctcag

SEQ ID NO: 5635 - DNA, 33 bp, Artificial Sequence
  Synthesized
gctcagcatggtactaagactgctgaggctcag

SEQ ID NO: 5636 - DNA, 33 bp, Artificial Sequence
  Synthesized
gctcagcatggttataaggatttgactgctcag

SEQ ID NO: 5637 - DNA, 33 bp, Artificial Sequence
  Synthesized
gctcagcatcatgaggattctgctatggctcag

SEQ ID NO: 5638 - DNA, 33 bp, Artificial Sequence
  Synthesized
gctcagcatcatgagttgtctgctatggctcag

SEQ ID NO: 5639 - DNA, 33 bp, Artificial Sequence
  Synthesized
gctcagcatcatattgcttctgctatggctcag

SEQ ID NO: 5640 - DNA, 33 bp, Artificial Sequence
  Synthesized
gctcagcatcatttgccttttcatttggctcag

SEQ ID NO: 5641 - DNA, 33 bp, Artificial Sequence
  Synthesized
gctcagcatcatttgcctttgcctaatgctcag

SEQ ID NO: 5642 - DNA, 33 bp, Artificial Sequence
  Synthesized
gctcagcatcatttgcctcgtgagtttgctcag

SEQ ID NO: 5643 - DNA, 33 bp, Artificial Sequence
  Synthesized
gctcagcatcatttgcctcgttttcctgctcag

SEQ ID NO: 5644 - DNA, 33 bp, Artificial Sequence
  Synthesized
gctcagcatcatttgcctcgtatgaaggctcag

SEQ ID NO: 5645 - DNA, 33 bp, Artificial Sequence
  Synthesized
gctcagcatcatttgcctcgtccttttgctcag

SEQ ID NO: 5646 - DNA, 33 bp, Artificial Sequence
  Synthesized
gctcagcatcatttgcctcgtcgtttggctcag

SEQ ID NO: 5647 - DNA, 33 bp, Artificial Sequence
  Synthesized
gctcagcatcatttgcctcgtgttaatgctcag

SEQ ID NO: 5648 - DNA, 33 bp, Artificial Sequence
  Synthesized
gctcagcatcatttgccttctactatggctcag

SEQ ID NO: 5649 - DNA, 33 bp, Artificial Sequence
  Synthesized
gctcagcatcatcctttttctgctatggctcag

SEQ ID NO: 5650 - DNA, 33 bp, Artificial Sequence
  Synthesized
gctcagcatcatcgtttgtctgctatggctcag

SEQ ID NO: 5651 - DNA, 33 bp, Artificial Sequence
  Synthesized
gctcagcatcattctcagtcttttatggctcag

SEQ ID NO: 5652 - DNA, 33 bp, Artificial Sequence
  Synthesized
gctcagcatcatactgagtctgctatggctcag

SEQ ID NO: 5653 - DNA, 33 bp, Artificial Sequence
  Synthesized
gctcagcatatttttaagtctgctatggctcag

SEQ ID NO: 5654 - DNA, 33 bp, Artificial Sequence
  Synthesized
gctcagcatattggtgttgattctcgtgctcag

SEQ ID NO: 5655 - DNA, 33 bp, Artificial Sequence
  Synthesized
gctcagcatattcatccttcttttatggctcag

SEQ ID NO: 5656 - DNA, 33 bp, Artificial Sequence
  Synthesized
gctcagcatattttgcctcgttttactgctcag

SEQ ID NO: 5657 - DNA, 33 bp, Artificial Sequence
  Synthesized
gctcagcataagattgatgttacttctgctcag

SEQ ID NO: 5658 - DNA, 33 bp, Artificial Sequence
  Synthesized
gctcagcataagttgccttttgcttatgctcag

SEQ ID NO: 5659 - DNA, 33 bp, Artificial Sequence
  Synthesized
gctcagcataagttgcctatgcatgaggctcag

SEQ ID NO: 5660 - DNA, 33 bp, Artificial Sequence
  Synthesized
gctcagcataagttgcctcgtcctttggctcag

SEQ ID NO: 5661 - DNA, 33 bp, Artificial Sequence
  Synthesized
gctcagcataagttgcctcgtccttatgctcag

SEQ ID NO: 5662 - DNA, 33 bp, Artificial Sequence
  Synthesized
gctcagcataagttgccttctcctcatgctcag

SEQ ID NO: 5663 - DNA, 33 bp, Artificial Sequence
  Synthesized
gctcagcataagttgactgatcgttctgctcag

SEQ ID NO: 5664 - DNA, 33 bp, Artificial Sequence
  Synthesized
gctcagcataagatgaattcttctggtgctcag

SEQ ID NO: 5665 - DNA, 33 bp, Artificial Sequence
  Synthesized
gctcagcataagaatttgcgtcaggatgctcag

SEQ ID NO: 5666 - DNA, 33 bp, Artificial Sequence
  Synthesized
gctcagcataagtctattcctggtactgctcag

SEQ ID NO: 5667 - DNA, 33 bp, Artificial Sequence
  Synthesized
gctcagcataagtctttgttggctgctgctcag

SEQ ID NO: 5668 - DNA, 33 bp, Artificial Sequence
  Synthesized
gctcagcataagactgcttcttcttctgctcag

SEQ ID NO: 5669 - DNA, 33 bp, Artificial Sequence
  Synthesized
gctcagcataagactaagtcttttatggctcag

SEQ ID NO: 5670 - DNA, 33 bp, Artificial Sequence
  Synthesized
gctcagcatttggctcgtgatgctttggctcag

SEQ ID NO: 5671 - DNA, 33 bp, Artificial Sequence
  Synthesized
gctcagcatttggagaagtctaagactgctcag

SEQ ID NO: 5672 - DNA, 33 bp, Artificial Sequence
  Synthesized
gctcagcatttgggtatgactgagtttgctcag

SEQ ID NO: 5673 - DNA, 33 bp, Artificial Sequence
  Synthesized
gctcagcatttgggttcttcttctggtgctcag

SEQ ID NO: 5674 - DNA, 33 bp, Artificial Sequence
  Synthesized
gctcagcatttgcataaggattatgctgctcag

SEQ ID NO: 5675 - DNA, 33 bp, Artificial Sequence
  Synthesized
gctcagcatttgaagcagccttcttctgctcag

SEQ ID NO: 5676 - DNA, 33 bp, Artificial Sequence
  Synthesized
gctcagcatttgaagcagacttctcaggctcag

SEQ ID NO: 5677 - DNA, 33 bp, Artificial Sequence
  Synthesized
gctcagcatttgaagtctactgaggatgctcag

SEQ ID NO: 5678 - DNA, 33 bp, Artificial Sequence
  Synthesized
gctcagcatttgttgcctgttcgtttggctcag

SEQ ID NO: 5679 - DNA, 33 bp, Artificial Sequence
  Synthesized
gctcagcatttgtctcgtgctggttctgctcag

SEQ ID NO: 5680 - DNA, 33 bp, Artificial Sequence
  Synthesized
gctcagcatttggttcagactacttctgctcag

SEQ ID NO: 5681 - DNA, 33 bp, Artificial Sequence
  Synthesized
gctcagcatttgtattctgatcaggatgctcag

SEQ ID NO: 5682 - DNA, 33 bp, Artificial Sequence
  Synthesized
gctcagcatatggattctaatacttctgctcag

SEQ ID NO: 5683 - DNA, 33 bp, Artificial Sequence
  Synthesized
gctcagcatatgaaggttgctgcttctgctcag

SEQ ID NO: 5684 - DNA, 33 bp, Artificial Sequence
  Synthesized
gctcagcatatgttgcctcgtcatcatgctcag

SEQ ID NO: 5685 - DNA, 33 bp, Artificial Sequence
  Synthesized
gctcagcatatgcctatgtctgctatggctcag

SEQ ID NO: 5686 - DNA, 33 bp, Artificial Sequence
  Synthesized
gctcagcataattttactcgtcatcctgctcag

SEQ ID NO: 5687 - DNA, 33 bp, Artificial Sequence
  Synthesized
gctcagcataattttactcgtcaggaggctcag

SEQ ID NO: 5688 - DNA, 33 bp, Artificial Sequence
  Synthesized
gctcagcataattttactcgtcgtcatgctcag

SEQ ID NO: 5689 - DNA, 33 bp, Artificial Sequence
  Synthesized
gctcagcataatggtactcgtggtcgtgctcag

SEQ ID NO: 5690 - DNA, 33 bp, Artificial Sequence
  Synthesized
gctcagcataatggtactcgtcgttctgctcag

SEQ ID NO: 5691 - DNA, 33 bp, Artificial Sequence
  Synthesized
gctcagcataatcatactcgtatgcatgctcag

SEQ ID NO: 5692 - DNA, 33 bp, Artificial Sequence
  Synthesized
gctcagcataatattatttcttttatggctcag

SEQ ID NO: 5693 - DNA, 33 bp, Artificial Sequence
  Synthesized
gctcagcataatattactcgtggtgaggctcag

SEQ ID NO: 5694 - DNA, 33 bp, Artificial Sequence
  Synthesized
gctcagcataatttgcctcgtcattctgctcag

SEQ ID NO: 5695 - DNA, 33 bp, Artificial Sequence
  Synthesized
gctcagcataataatactgctcatcatgctcag

SEQ ID NO: 5696 - DNA, 33 bp, Artificial Sequence
  Synthesized
gctcagcataataatactgataatcatgctcag

SEQ ID NO: 5697 - DNA, 33 bp, Artificial Sequence
  Synthesized
gctcagcataataatactgagaagcatgctcag

SEQ ID NO: 5698 - DNA, 33 bp, Artificial Sequence
  Synthesized
gctcagcataataatactggtcatcgtgctcag

SEQ ID NO: 5699 - DNA, 33 bp, Artificial Sequence
  Synthesized
gctcagcataataatactggtaagaatgctcag

SEQ ID NO: 5700 - DNA, 33 bp, Artificial Sequence
  Synthesized
gctcagcataataatactggtttgggtgctcag

SEQ ID NO: 5701 - DNA, 33 bp, Artificial Sequence
  Synthesized
gctcagcataataatactattatgcaggctcag

SEQ ID NO: 5702 - DNA, 33 bp, Artificial Sequence
  Synthesized
gctcagcataataatactatttctatggctcag

SEQ ID NO: 5703 - DNA, 33 bp, Artificial Sequence
  Synthesized
gctcagcataataatactaagcatggtgctcag

SEQ ID NO: 5704 - DNA, 33 bp, Artificial Sequence
  Synthesized
gctcagcataataatactatgtctaaggctcag

SEQ ID NO: 5705 - DNA, 33 bp, Artificial Sequence
  Synthesized
gctcagcataataatactcctggtcatgctcag

SEQ ID NO: 5706 - DNA, 33 bp, Artificial Sequence
  Synthesized
gctcagcataataatactcctaagcctgctcag

SEQ ID NO: 5707 - DNA, 33 bp, Artificial Sequence
  Synthesized
gctcagcataataatactcctcgtcatgctcag

SEQ ID NO: 5708 - DNA, 33 bp, Artificial Sequence
  Synthesized
gctcagcataataatactcctgttcaggctcag

SEQ ID NO: 5709 - DNA, 33 bp, Artificial Sequence
  Synthesized
gctcagcataataatactcagttgggtgctcag

SEQ ID NO: 5710 - DNA, 33 bp, Artificial Sequence
  Synthesized
gctcagcataataatactcgtaataaggctcag

SEQ ID NO: 5711 - DNA, 33 bp, Artificial Sequence
  Synthesized
gctcagcataataatactcgtcctcctgctcag

SEQ ID NO: 5712 - DNA, 33 bp, Artificial Sequence
  Synthesized
gctcagcataataatactgttaagaaggctcag

SEQ ID NO: 5713 - DNA, 33 bp, Artificial Sequence
  Synthesized
gctcagcataataatactgttgtttctgctcag

SEQ ID NO: 5714 - DNA, 33 bp, Artificial Sequence
  Synthesized
gctcagcataatcctgctccttattctgctcag

SEQ ID NO: 5715 - DNA, 33 bp, Artificial Sequence
  Synthesized
gctcagcataatcctgattatggttctgctcag

SEQ ID NO: 5716 - DNA, 33 bp, Artificial Sequence
  Synthesized
gctcagcataatcctgagtatgtttctgctcag

SEQ ID NO: 5717 - DNA, 33 bp, Artificial Sequence
  Synthesized
gctcagcataatccttttaagcgttctgctcag

SEQ ID NO: 5718 - DNA, 33 bp, Artificial Sequence
  Synthesized
gctcagcataatcctcatcctgagtctgctcag

SEQ ID NO: 5719 - DNA, 33 bp, Artificial Sequence
  Synthesized
gctcagcataatcctcatcgtcgttctgctcag

SEQ ID NO: 5720 - DNA, 33 bp, Artificial Sequence
  Synthesized
gctcagcataatcctcatcgttattctgctcag

SEQ ID NO: 5721 - DNA, 33 bp, Artificial Sequence
  Synthesized
gctcagcataatcctaaggctcgttctgctcag

SEQ ID NO: 5722 - DNA, 33 bp, Artificial Sequence
  Synthesized
gctcagcataatcctaatgagttttctgctcag

SEQ ID NO: 5723 - DNA, 33 bp, Artificial Sequence
  Synthesized
gctcagcataatcctcctggtccttctgctcag

SEQ ID NO: 5724 - DNA, 33 bp, Artificial Sequence
  Synthesized
gctcagcataatcctcctcataagtctgctcag

SEQ ID NO: 5725 - DNA, 33 bp, Artificial Sequence
  Synthesized
gctcagcataatcctcctattgagtctgctcag

SEQ ID NO: 5726 - DNA, 33 bp, Artificial Sequence
  Synthesized
gctcagcataatcctcctgttcattctgctcag

SEQ ID NO: 5727 - DNA, 33 bp, Artificial Sequence
  Synthesized
gctcagcataatcctcgttttacttctgctcag

SEQ ID NO: 5728 - DNA, 33 bp, Artificial Sequence
  Synthesized
gctcagcataatccttctgagccttctgctcag

SEQ ID NO: 5729 - DNA, 33 bp, Artificial Sequence
  Synthesized
gctcagcataatccttctaagcgttctgctcag

SEQ ID NO: 5730 - DNA, 33 bp, Artificial Sequence
  Synthesized
gctcagcataatcctactcgtttggatgctcag

SEQ ID NO: 5731 - DNA, 33 bp, Artificial Sequence
  Synthesized
gctcagcataatcctactcgtcgtaaggctcag

SEQ ID NO: 5732 - DNA, 33 bp, Artificial Sequence
  Synthesized
gctcagcataatcctgttggtcgttctgctcag

SEQ ID NO: 5733 - DNA, 33 bp, Artificial Sequence
  Synthesized
gctcagcataatcctgttcatcgttctgctcag

SEQ ID NO: 5734 - DNA, 33 bp, Artificial Sequence
  Synthesized
gctcagcataatcctgttaagcgttctgctcag

SEQ ID NO: 5735 - DNA, 33 bp, Artificial Sequence
  Synthesized
gctcagcataatcctgttatgcgttctgctcag

SEQ ID NO: 5736 - DNA, 33 bp, Artificial Sequence
  Synthesized
gctcagcataatcctgttaatcgttctgctcag

SEQ ID NO: 5737 - DNA, 33 bp, Artificial Sequence
  Synthesized
gctcagcataatcctgttcctcgttctgctcag

SEQ ID NO: 5738 - DNA, 33 bp, Artificial Sequence
  Synthesized
gctcagcataatcctgttcgtcgttctgctcag

SEQ ID NO: 5739 - DNA, 33 bp, Artificial Sequence
  Synthesized
gctcagcataatcctgtttatcgttctgctcag

SEQ ID NO: 5740 - DNA, 33 bp, Artificial Sequence
  Synthesized
gctcagcataatccttattttttttctgctcag

SEQ ID NO: 5741 - DNA, 33 bp, Artificial Sequence
  Synthesized
gctcagcataatcgtactcagaatgctgctcag

SEQ ID NO: 5742 - DNA, 33 bp, Artificial Sequence
  Synthesized
gctcagcataatcgtactcgtggtcaggctcag

SEQ ID NO: 5743 - DNA, 33 bp, Artificial Sequence
  Synthesized
gctcagcataattctcgttctgctatggctcag

SEQ ID NO: 5744 - DNA, 33 bp, Artificial Sequence
  Synthesized
gctcagcataattctgttaagaattctgctcag

SEQ ID NO: 5745 - DNA, 33 bp, Artificial Sequence
  Synthesized
gctcagcataatactggtcatggtttggctcag

SEQ ID NO: 5746 - DNA, 33 bp, Artificial Sequence
  Synthesized
gctcagcataatactcagttgcgtgctgctcag

SEQ ID NO: 5747 - DNA, 33 bp, Artificial Sequence
  Synthesized
gctcagcataatgttactcgtatgtttgctcag

SEQ ID NO: 5748 - DNA, 33 bp, Artificial Sequence
  Synthesized
gctcagcataattatactcgtgctcatgctcag

SEQ ID NO: 5749 - DNA, 33 bp, Artificial Sequence
  Synthesized
gctcagcataattatactcgttttcctgctcag

SEQ ID NO: 5750 - DNA, 33 bp, Artificial Sequence
  Synthesized
gctcagcataattatactcgtcgtcatgctcag

SEQ ID NO: 5751 - DNA, 33 bp, Artificial Sequence
  Synthesized
gctcagcataattatactcgtcgttatgctcag

SEQ ID NO: 5752 - DNA, 33 bp, Artificial Sequence
  Synthesized
gctcagcatcctggtgagtcttttatggctcag

SEQ ID NO: 5753 - DNA, 33 bp, Artificial Sequence
  Synthesized
gctcagcatcctaagcgttctgctatggctcag

SEQ ID NO: 5754 - DNA, 33 bp, Artificial Sequence
  Synthesized
gctcagcatcctttgcctgagtctcatgctcag

SEQ ID NO: 5755 - DNA, 33 bp, Artificial Sequence
  Synthesized
gctcagcatcctttgcctggtcattttgctcag

SEQ ID NO: 5756 - DNA, 33 bp, Artificial Sequence
  Synthesized
gctcagcatcctttgcctcatcaggctgctcag

SEQ ID NO: 5757 - DNA, 33 bp, Artificial Sequence
  Synthesized
gctcagcatcctttgcctcgttttttggctcag

SEQ ID NO: 5758 - DNA, 33 bp, Artificial Sequence
  Synthesized
gctcagcatcctttgcctcgtcatcctgctcag

SEQ ID NO: 5759 - DNA, 33 bp, Artificial Sequence
  Synthesized
gctcagcatcctttgcctcgtcgtactgctcag

SEQ ID NO: 5760 - DNA, 33 bp, Artificial Sequence
  Synthesized
gctcagcatcctttgcctcgttatcctgctcag

SEQ ID NO: 5761 - DNA, 33 bp, Artificial Sequence
  Synthesized
gctcagcatcctttgcctgttcctgatgctcag

SEQ ID NO: 5762 - DNA, 33 bp, Artificial Sequence
  Synthesized
gctcagcatccttctaagaatcagttggctcag

SEQ ID NO: 5763 - DNA, 33 bp, Artificial Sequence
  Synthesized
gctcagcatccttctcgtaatttgaatgctcag

SEQ ID NO: 5764 - DNA, 33 bp, Artificial Sequence
  Synthesized
gctcagcatcagggtggttctgctatggctcag

SEQ ID NO: 5765 - DNA, 33 bp, Artificial Sequence
  Synthesized
gctcagcatcagcatattgttccttctgctcag

SEQ ID NO: 5766 - DNA, 33 bp, Artificial Sequence
  Synthesized
gctcagcatcagaagcattcttttatggctcag

SEQ ID NO: 5767 - DNA, 33 bp, Artificial Sequence
  Synthesized
gctcagcatcagaagattatgcctaatgctcag

SEQ ID NO: 5768 - DNA, 33 bp, Artificial Sequence
  Synthesized
gctcagcatcagttgccttttcatcctgctcag

SEQ ID NO: 5769 - DNA, 33 bp, Artificial Sequence
  Synthesized
gctcagcatcagttgcctcgtactgaggctcag

SEQ ID NO: 5770 - DNA, 33 bp, Artificial Sequence
  Synthesized
gctcagcatcagaatgttattcctcctgctcag

SEQ ID NO: 5771 - DNA, 33 bp, Artificial Sequence
  Synthesized
gctcagcatcagcgtttttctgctatggctcag

SEQ ID NO: 5772 - DNA, 33 bp, Artificial Sequence
  Synthesized
gctcagcatcagcgtactgttaatttggctcag

SEQ ID NO: 5773 - DNA, 33 bp, Artificial Sequence
  Synthesized
gctcagcatcgtggtcgttctgctatggctcag

SEQ ID NO: 5774 - DNA, 33 bp, Artificial Sequence
  Synthesized
gctcagcatcgtttgcctcgtcataatgctcag

SEQ ID NO: 5775 - DNA, 33 bp, Artificial Sequence
  Synthesized
gctcagcatcgtttgcctcgtcctggtgctcag

SEQ ID NO: 5776 - DNA, 33 bp, Artificial Sequence
  Synthesized
gctcagcatcgtttgcctcgttattatgctcag

SEQ ID NO: 5777 - DNA, 33 bp, Artificial Sequence
  Synthesized
gctcagcatcgtaattctgctggtgttgctcag

SEQ ID NO: 5778 - DNA, 33 bp, Artificial Sequence
  Synthesized
gctcagcatcgttctttgactggtaatgctcag

SEQ ID NO: 5779 - DNA, 33 bp, Artificial Sequence
  Synthesized
gctcagcattctgctactcgttctcctgctcag

SEQ ID NO: 5780 - DNA, 33 bp, Artificial Sequence
  Synthesized
gctcagcattctggtttgcagcatgatgctcag

SEQ ID NO: 5781 - DNA, 33 bp, Artificial Sequence
  Synthesized
gctcagcattctggttcttcttctattgctcag

SEQ ID NO: 5782 - DNA, 33 bp, Artificial Sequence
  Synthesized
gctcagcattctcatttgaagtctgaggctcag

SEQ ID NO: 5783 - DNA, 33 bp, Artificial Sequence
  Synthesized
gctcagcattctaagcctgctgctaatgctcag

SEQ ID NO: 5784 - DNA, 33 bp, Artificial Sequence
  Synthesized
gctcagcattctttgcctccttttggtgctcag

SEQ ID NO: 5785 - DNA, 33 bp, Artificial Sequence
  Synthesized
gctcagcattctttgcctcgtaagaatgctcag

SEQ ID NO: 5786 - DNA, 33 bp, Artificial Sequence
  Synthesized
gctcagcattctttgactaatatgcgtgctcag

SEQ ID NO: 5787 - DNA, 33 bp, Artificial Sequence
  Synthesized
gctcagcattctcagcagttggctcaggctcag

SEQ ID NO: 5788 - DNA, 33 bp, Artificial Sequence
  Synthesized
gctcagcattctcgtttgggttctgttgctcag

SEQ ID NO: 5789 - DNA, 33 bp, Artificial Sequence
  Synthesized
gctcagcattctactgcttctgctatggctcag

SEQ ID NO: 5790 - DNA, 33 bp, Artificial Sequence
  Synthesized
gctcagcattctactaagtttaatggtgctcag

SEQ ID NO: 5791 - DNA, 33 bp, Artificial Sequence
  Synthesized
gctcagcattctactcgtaatcctgatgctcag

SEQ ID NO: 5792 - DNA, 33 bp, Artificial Sequence
  Synthesized
gctcagcattctgttgttaatgatcgtgctcag

SEQ ID NO: 5793 - DNA, 33 bp, Artificial Sequence
  Synthesized
gctcagcatactaaggaggttttgactgctcag

SEQ ID NO: 5794 - DNA, 33 bp, Artificial Sequence
  Synthesized
gctcagcatactttgaatcgtttggaggctcag

SEQ ID NO: 5795 - DNA, 33 bp, Artificial Sequence
  Synthesized
gctcagcatactttgcctaaggttaaggctcag

SEQ ID NO: 5796 - DNA, 33 bp, Artificial Sequence
  Synthesized
gctcagcatactttgcctcgtggtcaggctcag

SEQ ID NO: 5797 - DNA, 33 bp, Artificial Sequence
  Synthesized
gctcagcatactttgcctcgtcatactgctcag

SEQ ID NO: 5798 - DNA, 33 bp, Artificial Sequence
  Synthesized
gctcagcatactatgacttcttttatggctcag

SEQ ID NO: 5799 - DNA, 33 bp, Artificial Sequence
  Synthesized
gctcagcatactcaggagactatgtatgctcag

SEQ ID NO: 5800 - DNA, 33 bp, Artificial Sequence
  Synthesized
gctcagcatactcagttgcgtttgcctgctcag

SEQ ID NO: 5801 - DNA, 33 bp, Artificial Sequence
  Synthesized
gctcagcatacttctccttctgttatggctcag

SEQ ID NO: 5802 - DNA, 33 bp, Artificial Sequence
  Synthesized
gctcagcatactactatgaatcctaaggctcag

SEQ ID NO: 5803 - DNA, 33 bp, Artificial Sequence
  Synthesized
gctcagcatactacttctattcataatgctcag

SEQ ID NO: 5804 - DNA, 33 bp, Artificial Sequence
  Synthesized
gctcagcatgtttctactcagaagttggctcag

SEQ ID NO: 5805 - DNA, 33 bp, Artificial Sequence
  Synthesized
gctcagcatgttactcagttgcgtgatgctcag

SEQ ID NO: 5806 - DNA, 33 bp, Artificial Sequence
  Synthesized
gctcagcatgttgttttgcagactgaggctcag

SEQ ID NO: 5807 - DNA, 33 bp, Artificial Sequence
  Synthesized
gctcagcattatgctaatactaagtctgctcag

SEQ ID NO: 5808 - DNA, 33 bp, Artificial Sequence
  Synthesized
gctcagcattatggtttgtctgctatggctcag

SEQ ID NO: 5809 - DNA, 33 bp, Artificial Sequence
  Synthesized
gctcagcattatcataattcttttatggctcag

SEQ ID NO: 5810 - DNA, 33 bp, Artificial Sequence
  Synthesized
gctcagcattatttgcctcatcgttctgctcag

SEQ ID NO: 5811 - DNA, 33 bp, Artificial Sequence
  Synthesized
gctcagcattatttgcctcgtattggtgctcag

SEQ ID NO: 5812 - DNA, 33 bp, Artificial Sequence
  Synthesized
gctcagcattatttgccttctccttttgctcag

SEQ ID NO: 5813 - DNA, 33 bp, Artificial Sequence
  Synthesized
gctcagcattatcagatgtcttttatggctcag

SEQ ID NO: 5814 - DNA, 33 bp, Artificial Sequence
  Synthesized
gctcagattgctgctgttggtgttttggctcag

SEQ ID NO: 5815 - DNA, 33 bp, Artificial Sequence
  Synthesized
gctcagattgctggtcgtaatcagtctgctcag

SEQ ID NO: 5816 - DNA, 33 bp, Artificial Sequence
  Synthesized
gctcagattgctaagttgaagactgatgctcag

SEQ ID NO: 5817 - DNA, 33 bp, Artificial Sequence
  Synthesized
gctcagattgctaagactgagatgcgtgctcag

SEQ ID NO: 5818 - DNA, 33 bp, Artificial Sequence
  Synthesized
gctcagattgctttgtctattcctcaggctcag

SEQ ID NO: 5819 - DNA, 33 bp, Artificial Sequence
  Synthesized
gctcagattgctttgactaatcgtcctgctcag

SEQ ID NO: 5820 - DNA, 33 bp, Artificial Sequence
  Synthesized
gctcagattgctcagtcttcttctcgtgctcag

SEQ ID NO: 5821 - DNA, 33 bp, Artificial Sequence
  Synthesized
gctcagattgctcgtttgtctggtaatgctcag

SEQ ID NO: 5822 - DNA, 33 bp, Artificial Sequence
  Synthesized
gctcagattgctcgttctgttgctcctgctcag

SEQ ID NO: 5823 - DNA, 33 bp, Artificial Sequence
  Synthesized
gctcagattgctcgtactatgcagtctgctcag

SEQ ID NO: 5824 - DNA, 33 bp, Artificial Sequence
  Synthesized
gctcagattgcttctgctcctatgcaggctcag

SEQ ID NO: 5825 - DNA, 33 bp, Artificial Sequence
  Synthesized
gctcagattgcttctattggtcagactgctcag

SEQ ID NO: 5826 - DNA, 33 bp, Artificial Sequence
  Synthesized
gctcagattgctactcgtggtggtgctgctcag

SEQ ID NO: 5827 - DNA, 33 bp, Artificial Sequence
  Synthesized
gctcagattgctactcgtggttcttctgctcag

SEQ ID NO: 5828 - DNA, 33 bp, Artificial Sequence
  Synthesized
gctcagattgctgttaagtctaaggatgctcag

SEQ ID NO: 5829 - DNA, 33 bp, Artificial Sequence
  Synthesized
gctcagattgatgctaatattcctttggctcag

SEQ ID NO: 5830 - DNA, 33 bp, Artificial Sequence
  Synthesized
gctcagattgatttgcctcagggtcatgctcag

SEQ ID NO: 5831 - DNA, 33 bp, Artificial Sequence
  Synthesized
gctcagattgatttgcctcgttttaaggctcag

SEQ ID NO: 5832 - DNA, 33 bp, Artificial Sequence
  Synthesized
gctcagattgataatcgtttgaaggctgctcag

SEQ ID NO: 5833 - DNA, 33 bp, Artificial Sequence
  Synthesized
gctcagattgattatactggtgagcaggctcag

SEQ ID NO: 5834 - DNA, 33 bp, Artificial Sequence
  Synthesized
gctcagattgagttgcctcgtcctcgtgctcag

SEQ ID NO: 5835 - DNA, 33 bp, Artificial Sequence
  Synthesized
gctcagattgagcgtactcgtgttggtgctcag

SEQ ID NO: 5836 - DNA, 33 bp, Artificial Sequence
  Synthesized
gctcagatttttaattctaatcagattgctcag

SEQ ID NO: 5837 - DNA, 33 bp, Artificial Sequence
  Synthesized
gctcagattggtgctgtttctcgtactgctcag

SEQ ID NO: 5838 - DNA, 33 bp, Artificial Sequence
  Synthesized
gctcagattggtgatcctcgtgatcctgctcag

SEQ ID NO: 5839 - DNA, 33 bp, Artificial Sequence
  Synthesized
gctcagattggtgagggtactcctatggctcag

SEQ ID NO: 5840 - DNA, 33 bp, Artificial Sequence
  Synthesized
gctcagattggtggtactttgcgtgctgctcag

SEQ ID NO: 5841 - DNA, 33 bp, Artificial Sequence
  Synthesized
gctcagattggtggttatggtactcaggctcag

SEQ ID NO: 5842 - DNA, 33 bp, Artificial Sequence
  Synthesized
gctcagattggtaagattactaatatggctcag

SEQ ID NO: 5843 - DNA, 33 bp, Artificial Sequence
  Synthesized
gctcagattggtaagtctggttcttttgctcag

SEQ ID NO: 5844 - DNA, 33 bp, Artificial Sequence
  Synthesized
gctcagattggtttgaatcatgctatggctcag

SEQ ID NO: 5845 - DNA, 33 bp, Artificial Sequence
  Synthesized
gctcagattggtttgcctatgggtgttgctcag

SEQ ID NO: 5846 - DNA, 33 bp, Artificial Sequence
  Synthesized
gctcagattggtttgcctcgttataatgctcag

SEQ ID NO: 5847 - DNA, 33 bp, Artificial Sequence
  Synthesized
gctcagattggtttgcagaatgttaaggctcag

SEQ ID NO: 5848 - DNA, 33 bp, Artificial Sequence
  Synthesized
gctcagattggtcagggtattattcgtgctcag

SEQ ID NO: 5849 - DNA, 33 bp, Artificial Sequence
  Synthesized
gctcagattggtcgtcattctgctatggctcag

SEQ ID NO: 5850 - DNA, 33 bp, Artificial Sequence
  Synthesized
gctcagattggtcgtactactatgcctgctcag

SEQ ID NO: 5851 - DNA, 33 bp, Artificial Sequence
  Synthesized
gctcagattggtcgtgttggttctcctgctcag

SEQ ID NO: 5852 - DNA, 33 bp, Artificial Sequence
  Synthesized
gctcagattggtactgctcatactcctgctcag

SEQ ID NO: 5853 - DNA, 33 bp, Artificial Sequence
  Synthesized
gctcagattggtactgagcgtcagaaggctcag

SEQ ID NO: 5854 - DNA, 33 bp, Artificial Sequence
  Synthesized
gctcagattggtactactcgtgctactgctcag

SEQ ID NO: 5855 - DNA, 33 bp, Artificial Sequence
  Synthesized
gctcagattggttatggttcttttatggctcag

SEQ ID NO: 5856 - DNA, 33 bp, Artificial Sequence
  Synthesized
gctcagattcatgctgtttcttttatggctcag

SEQ ID NO: 5857 - DNA, 33 bp, Artificial Sequence
  Synthesized
gctcagattcatttgcctggtcgttctgctcag

SEQ ID NO: 5858 - DNA, 33 bp, Artificial Sequence
  Synthesized
gctcagattcatttgcctcgtggtcctgctcag

SEQ ID NO: 5859 - DNA, 33 bp, Artificial Sequence
  Synthesized
gctcagattcatttgcctcgtattttggctcag

SEQ ID NO: 5860 - DNA, 33 bp, Artificial Sequence
  Synthesized
gctcagattcattctaatcagaagtttgctcag

SEQ ID NO: 5861 - DNA, 33 bp, Artificial Sequence
  Synthesized
gctcagattcattctgttgttggttctgctcag

SEQ ID NO: 5862 - DNA, 33 bp, Artificial Sequence
  Synthesized
gctcagattcatactaataattctcctgctcag

SEQ ID NO: 5863 - DNA, 33 bp, Artificial Sequence
  Synthesized
gctcagattcattatatgtctgctatggctcag

SEQ ID NO: 5864 - DNA, 33 bp, Artificial Sequence
  Synthesized
gctcagattattcatacttcttctcaggctcag

SEQ ID NO: 5865 - DNA, 33 bp, Artificial Sequence
  Synthesized
gctcagattattcagatgtctcagaaggctcag

SEQ ID NO: 5866 - DNA, 33 bp, Artificial Sequence
  Synthesized
gctcagattattgttaatgctaaggctgctcag

SEQ ID NO: 5867 - DNA, 33 bp, Artificial Sequence
  Synthesized
gctcagattaaggctttgaatgcttctgctcag

SEQ ID NO: 5868 - DNA, 33 bp, Artificial Sequence
  Synthesized
gctcagattaaggctcagactgagcatgctcag

SEQ ID NO: 5869 - DNA, 33 bp, Artificial Sequence
  Synthesized
gctcagattaaggcttctaatgtttatgctcag

SEQ ID NO: 5870 - DNA, 33 bp, Artificial Sequence
  Synthesized
gctcagattaaggagtctacttctactgctcag

SEQ ID NO: 5871 - DNA, 33 bp, Artificial Sequence
  Synthesized
gctcagattaagcatggtatgaatactgctcag

SEQ ID NO: 5872 - DNA, 33 bp, Artificial Sequence
  Synthesized
gctcagattaagaagcctggtaatattgctcag

SEQ ID NO: 5873 - DNA, 33 bp, Artificial Sequence
  Synthesized
gctcagattaagttgcctcctttttttgctcag

SEQ ID NO: 5874 - DNA, 33 bp, Artificial Sequence
  Synthesized
gctcagattaagcagatgcctggtgttgctcag

SEQ ID NO: 5875 - DNA, 33 bp, Artificial Sequence
  Synthesized
gctcagattttggatcgttctgctatggctcag

SEQ ID NO: 5876 - DNA, 33 bp, Artificial Sequence
  Synthesized
gctcagattttggatcgtactggttctgctcag

SEQ ID NO: 5877 - DNA, 33 bp, Artificial Sequence
  Synthesized
gctcagattttgcatacttctcgtcctgctcag

SEQ ID NO: 5878 - DNA, 33 bp, Artificial Sequence
  Synthesized
gctcagattttgaagcagggtgctgctgctcag

SEQ ID NO: 5879 - DNA, 33 bp, Artificial Sequence
  Synthesized
gctcagattttgttgcagactaaggctgctcag

SEQ ID NO: 5880 - DNA, 33 bp, Artificial Sequence
  Synthesized
gctcagattttgcctaaggttgagatggctcag

SEQ ID NO: 5881 - DNA, 33 bp, Artificial Sequence
  Synthesized
gctcagattttgccttctactcgtcctgctcag

SEQ ID NO: 5882 - DNA, 33 bp, Artificial Sequence
  Synthesized
gctcagattttgtctactgctcagactgctcag

SEQ ID NO: 5883 - DNA, 33 bp, Artificial Sequence
  Synthesized
gctcagattttgactaataagcagtctgctcag

SEQ ID NO: 5884 - DNA, 33 bp, Artificial Sequence
  Synthesized
gctcagattttgactactaaggttgctgctcag

SEQ ID NO: 5885 - DNA, 33 bp, Artificial Sequence
  Synthesized
gctcagattttgactactgttgctttggctcag

SEQ ID NO: 5886 - DNA, 33 bp, Artificial Sequence
  Synthesized
gctcagattttggttgatactcattctgctcag

SEQ ID NO: 5887 - DNA, 33 bp, Artificial Sequence
  Synthesized
gctcagattatgcgtcagggtcagtctgctcag

SEQ ID NO: 5888 - DNA, 33 bp, Artificial Sequence
  Synthesized
gctcagattaatggtggtcgttctcctgctcag

SEQ ID NO: 5889 - DNA, 33 bp, Artificial Sequence
  Synthesized
gctcagattaatggtactcgtttttttgctcag

SEQ ID NO: 5890 - DNA, 33 bp, Artificial Sequence
  Synthesized
gctcagattaatcatggtttgactaaggctcag

SEQ ID NO: 5891 - DNA, 33 bp, Artificial Sequence
  Synthesized
gctcagattaatcatcaggttcagtctgctcag

SEQ ID NO: 5892 - DNA, 33 bp, Artificial Sequence
  Synthesized
gctcagattaatcatactcgttataaggctcag

SEQ ID NO: 5893 - DNA, 33 bp, Artificial Sequence
  Synthesized
gctcagattaataagactcgtcgtatggctcag

SEQ ID NO: 5894 - DNA, 33 bp, Artificial Sequence
  Synthesized
gctcagattaataagactcgttctaatgctcag

SEQ ID NO: 5895 - DNA, 33 bp, Artificial Sequence
  Synthesized
gctcagattaatttgcctcgtaaggaggctcag

SEQ ID NO: 5896 - DNA, 33 bp, Artificial Sequence
  Synthesized
gctcagattaatttgccttatatgtttgctcag

SEQ ID NO: 5897 - DNA, 33 bp, Artificial Sequence
  Synthesized
gctcagattaataatactgagatgtatgctcag

SEQ ID NO: 5898 - DNA, 33 bp, Artificial Sequence
  Synthesized
gctcagattaataatactcatatgcaggctcag

SEQ ID NO: 5899 - DNA, 33 bp, Artificial Sequence
  Synthesized
gctcagattaataatactattcctcatgctcag

SEQ ID NO: 5900 - DNA, 33 bp, Artificial Sequence
  Synthesized
gctcagattaataatactcgttttactgctcag

SEQ ID NO: 5901 - DNA, 33 bp, Artificial Sequence
  Synthesized
gctcagattaatcctggtaagatttctgctcag

SEQ ID NO: 5902 - DNA, 33 bp, Artificial Sequence
  Synthesized
gctcagattaatcctaaggatatgtctgctcag

SEQ ID NO: 5903 - DNA, 33 bp, Artificial Sequence
  Synthesized
gctcagattaatcctaagtctcgttctgctcag

SEQ ID NO: 5904 - DNA, 33 bp, Artificial Sequence
  Synthesized
gctcagattaatcctatgcgtaatcaggctcag

SEQ ID NO: 5905 - DNA, 33 bp, Artificial Sequence
  Synthesized
gctcagattaatcctcctcctatgtctgctcag

SEQ ID NO: 5906 - DNA, 33 bp, Artificial Sequence
  Synthesized
gctcagattaatcctcagaaggagcgtgctcag

SEQ ID NO: 5907 - DNA, 33 bp, Artificial Sequence
  Synthesized
gctcagattaatcctactcgtggttatgctcag

SEQ ID NO: 5908 - DNA, 33 bp, Artificial Sequence
  Synthesized
gctcagattaatcctactcgtccttatgctcag

SEQ ID NO: 5909 - DNA, 33 bp, Artificial Sequence
  Synthesized
gctcagattaatcctgtttttcgttctgctcag

SEQ ID NO: 5910 - DNA, 33 bp, Artificial Sequence
  Synthesized
gctcagattaatcctgttcctcgttctgctcag

SEQ ID NO: 5911 - DNA, 33 bp, Artificial Sequence
  Synthesized
gctcagattaatcctgtttatcgttctgctcag

SEQ ID NO: 5912 - DNA, 33 bp, Artificial Sequence
  Synthesized
gctcagattaatccttatcctggttctgctcag

SEQ ID NO: 5913 - DNA, 33 bp, Artificial Sequence
  Synthesized
gctcagattaatcgtgatccttctaaggctcag

SEQ ID NO: 5914 - DNA, 33 bp, Artificial Sequence
  Synthesized
gctcagattaattctattaagcctactgctcag

SEQ ID NO: 5915 - DNA, 33 bp, Artificial Sequence
  Synthesized
gctcagattaattctaaggctatgattgctcag

SEQ ID NO: 5916 - DNA, 33 bp, Artificial Sequence
  Synthesized
gctcagattaattctaagactgagatggctcag

SEQ ID NO: 5917 - DNA, 33 bp, Artificial Sequence
  Synthesized
gctcagattaattctcctcgttctcctgctcag

SEQ ID NO: 5918 - DNA, 33 bp, Artificial Sequence
  Synthesized
gctcagattaattctactcgtaagattgctcag

SEQ ID NO: 5919 - DNA, 33 bp, Artificial Sequence
  Synthesized
gctcagattaattctactcgttctaaggctcag

SEQ ID NO: 5920 - DNA, 33 bp, Artificial Sequence
  Synthesized
gctcagattaatactgctttggctcctgctcag

SEQ ID NO: 5921 - DNA, 33 bp, Artificial Sequence
  Synthesized
gctcagattaatactcatcctatttctgctcag

SEQ ID NO: 5922 - DNA, 33 bp, Artificial Sequence
  Synthesized
gctcagattcctggtaatttggataaggctcag

SEQ ID NO: 5923 - DNA, 33 bp, Artificial Sequence
  Synthesized
gctcagattcctggttctggtaagatggctcag

SEQ ID NO: 5924 - DNA, 33 bp, Artificial Sequence
  Synthesized
gctcagattcctattcgtgctgctgatgctcag

SEQ ID NO: 5925 - DNA, 33 bp, Artificial Sequence
  Synthesized
gctcagattcctaagtctgctatttctgctcag

SEQ ID NO: 5926 - DNA, 33 bp, Artificial Sequence
  Synthesized
gctcagattcctaagtctatgcctttggctcag

SEQ ID NO: 5927 - DNA, 33 bp, Artificial Sequence
  Synthesized
gctcagattcctaagactaagcctcctgctcag

SEQ ID NO: 5928 - DNA, 33 bp, Artificial Sequence
  Synthesized
gctcagattcctttgaataatcgtatggctcag

SEQ ID NO: 5929 - DNA, 33 bp, Artificial Sequence
  Synthesized
gctcagattcctttgcctcgttatcaggctcag

SEQ ID NO: 5930 - DNA, 33 bp, Artificial Sequence
  Synthesized
gctcagattcctcagactcctcgtggtgctcag

SEQ ID NO: 5931 - DNA, 33 bp, Artificial Sequence
  Synthesized
gctcagattcctcgtttggagcagtctgctcag

SEQ ID NO: 5932 - DNA, 33 bp, Artificial Sequence
  Synthesized
gctcagattccttctcgtaattctcatgctcag

SEQ ID NO: 5933 - DNA, 33 bp, Artificial Sequence
  Synthesized
gctcagattccttctactcagcagcgtgctcag

SEQ ID NO: 5934 - DNA, 33 bp, Artificial Sequence
  Synthesized
gctcagattcctactaagtctgttttggctcag

SEQ ID NO: 5935 - DNA, 33 bp, Artificial Sequence
  Synthesized
gctcagattccttatccttctgctatggctcag

SEQ ID NO: 5936 - DNA, 33 bp, Artificial Sequence
  Synthesized
gctcagattcagcatgatgatttgttggctcag

SEQ ID NO: 5937 - DNA, 33 bp, Artificial Sequence
  Synthesized
gctcagattcagcattctcctgagcgtgctcag

SEQ ID NO: 5938 - DNA, 33 bp, Artificial Sequence
  Synthesized
gctcagattcagttgcctggtaatcctgctcag

SEQ ID NO: 5939 - DNA, 33 bp, Artificial Sequence
  Synthesized
gctcagattcagttgcctaagggtgaggctcag

SEQ ID NO: 5940 - DNA, 33 bp, Artificial Sequence
  Synthesized
gctcagattcagaatattcgtggttctgctcag

SEQ ID NO: 5941 - DNA, 33 bp, Artificial Sequence
  Synthesized
gctcagattcagccttctcagtctaatgctcag

SEQ ID NO: 5942 - DNA, 33 bp, Artificial Sequence
  Synthesized
gctcagattcagcagtctattggtaaggctcag

SEQ ID NO: 5943 - DNA, 33 bp, Artificial Sequence
  Synthesized
gctcagattcagtctgcttctcgtcctgctcag

SEQ ID NO: 5944 - DNA, 33 bp, Artificial Sequence
  Synthesized
gctcagattcagtctcctttgcctatggctcag

SEQ ID NO: 5945 - DNA, 33 bp, Artificial Sequence
  Synthesized
gctcagattcagactaagtttttggctgctcag

SEQ ID NO: 5946 - DNA, 33 bp, Artificial Sequence
  Synthesized
gctcagattcagactcgtgctgctcctgctcag

SEQ ID NO: 5947 - DNA, 33 bp, Artificial Sequence
  Synthesized
gctcagattcgtgagaagatggctcctgctcag

SEQ ID NO: 5948 - DNA, 33 bp, Artificial Sequence
  Synthesized
gctcagattcgtggtcattctgctatggctcag

SEQ ID NO: 5949 - DNA, 33 bp, Artificial Sequence
  Synthesized
gctcagattcgtcatgctgatatttctgctcag

SEQ ID NO: 5950 - DNA, 33 bp, Artificial Sequence
  Synthesized
gctcagattcgtcagcgtgagttggatgctcag

SEQ ID NO: 5951 - DNA, 33 bp, Artificial Sequence
  Synthesized
gctcagattcgtcgttctactgatgatgctcag

SEQ ID NO: 5952 - DNA, 33 bp, Artificial Sequence
  Synthesized
gctcagattcgttctaatactggttctgctcag

SEQ ID NO: 5953 - DNA, 33 bp, Artificial Sequence
  Synthesized
gctcagattcgtactgctacttcttctgctcag

SEQ ID NO: 5954 - DNA, 33 bp, Artificial Sequence
  Synthesized
gctcagattcgtgtttctactgttactgctcag

SEQ ID NO: 5955 - DNA, 33 bp, Artificial Sequence
  Synthesized
gctcagattcgtgttactcctggtggtgctcag

SEQ ID NO: 5956 - DNA, 33 bp, Artificial Sequence
  Synthesized
gctcagatttctggtttgaagaatgttgctcag

SEQ ID NO: 5957 - DNA, 33 bp, Artificial Sequence
  Synthesized
gctcagatttctggtcctattcgtaatgctcag

SEQ ID NO: 5958 - DNA, 33 bp, Artificial Sequence
  Synthesized
gctcagatttctggtcgtaatttgaatgctcag

SEQ ID NO: 5959 - DNA, 33 bp, Artificial Sequence
  Synthesized
gctcagatttctggttcttctgctatggctcag

SEQ ID NO: 5960 - DNA, 33 bp, Artificial Sequence
  Synthesized
gctcagatttctaagactatgatttctgctcag

SEQ ID NO: 5961 - DNA, 33 bp, Artificial Sequence
  Synthesized
gctcagatttctaatcctactaagatggctcag

SEQ ID NO: 5962 - DNA, 33 bp, Artificial Sequence
  Synthesized
gctcagatttctcctatggctcgtgctgctcag

SEQ ID NO: 5963 - DNA, 33 bp, Artificial Sequence
  Synthesized
gctcagatttctcctactaagtatactgctcag

SEQ ID NO: 5964 - DNA, 33 bp, Artificial Sequence
  Synthesized
gctcagatttctcagtctcctcgtttggctcag

SEQ ID NO: 5965 - DNA, 33 bp, Artificial Sequence
  Synthesized
gctcagatttctcgtgcttatggtcaggctcag

SEQ ID NO: 5966 - DNA, 33 bp, Artificial Sequence
  Synthesized
gctcagatttctcgtgatcatactcaggctcag

SEQ ID NO: 5967 - DNA, 33 bp, Artificial Sequence
  Synthesized
gctcagatttctcgtggtgttactgctgctcag

SEQ ID NO: 5968 - DNA, 33 bp, Artificial Sequence
  Synthesized
gctcagatttcttctgatactcgtcgtgctcag

SEQ ID NO: 5969 - DNA, 33 bp, Artificial Sequence
  Synthesized
gctcagatttcttctggtaagaatttggctcag

SEQ ID NO: 5970 - DNA, 33 bp, Artificial Sequence
  Synthesized
gctcagatttcttctaagacttctttggctcag

SEQ ID NO: 5971 - DNA, 33 bp, Artificial Sequence
  Synthesized
gctcagatttcttctcagcgtcctattgctcag

SEQ ID NO: 5972 - DNA, 33 bp, Artificial Sequence
  Synthesized
gctcagatttcttcttctgagtcttctgctcag

SEQ ID NO: 5973 - DNA, 33 bp, Artificial Sequence
  Synthesized
gctcagatttcttcttcttcttcttctgctcag

SEQ ID NO: 5974 - DNA, 33 bp, Artificial Sequence
  Synthesized
gctcagattactggtaattctatgttggctcag

SEQ ID NO: 5975 - DNA, 33 bp, Artificial Sequence
  Synthesized
gctcagattactggttctccttctcctgctcag

SEQ ID NO: 5976 - DNA, 33 bp, Artificial Sequence
  Synthesized
gctcagattactattcgtgagggtaaggctcag

SEQ ID NO: 5977 - DNA, 33 bp, Artificial Sequence
  Synthesized
gctcagattactaagactgattctgatgctcag

SEQ ID NO: 5978 - DNA, 33 bp, Artificial Sequence
  Synthesized
gctcagattactaaggttggtgagtctgctcag

SEQ ID NO: 5979 - DNA, 33 bp, Artificial Sequence
  Synthesized
gctcagattactcctttgcctcgtactgctcag

SEQ ID NO: 5980 - DNA, 33 bp, Artificial Sequence
  Synthesized
gctcagattactcagttgcgtcataatgctcag

SEQ ID NO: 5981 - DNA, 33 bp, Artificial Sequence
  Synthesized
gctcagattactcagcagatgaaggctgctcag

SEQ ID NO: 5982 - DNA, 33 bp, Artificial Sequence
  Synthesized
gctcagattacttctaaggttcatactgctcag

SEQ ID NO: 5983 - DNA, 33 bp, Artificial Sequence
  Synthesized
gctcagattacttctacttctgttcgtgctcag

SEQ ID NO: 5984 - DNA, 33 bp, Artificial Sequence
  Synthesized
gctcagattactgtttctaattctatggctcag

SEQ ID NO: 5985 - DNA, 33 bp, Artificial Sequence
  Synthesized
gctcagattgttgctggtcatcgtgatgctcag

SEQ ID NO: 5986 - DNA, 33 bp, Artificial Sequence
  Synthesized
gctcagattgttgctcgttctggttctgctcag

SEQ ID NO: 5987 - DNA, 33 bp, Artificial Sequence
  Synthesized
gctcagattgttggtatgtctttgattgctcag

SEQ ID NO: 5988 - DNA, 33 bp, Artificial Sequence
  Synthesized
gctcagattgttcataatactgatattgctcag

SEQ ID NO: 5989 - DNA, 33 bp, Artificial Sequence
  Synthesized
gctcagattgttcatacttcttcttctgctcag

SEQ ID NO: 5990 - DNA, 33 bp, Artificial Sequence
  Synthesized
gctcagattgttaaggatactcctcgtgctcag

SEQ ID NO: 5991 - DNA, 33 bp, Artificial Sequence
  Synthesized
gctcagattgttaagggtgttacttctgctcag

SEQ ID NO: 5992 - DNA, 33 bp, Artificial Sequence
  Synthesized
gctcagattgttaagaatgagaagatggctcag

SEQ ID NO: 5993 - DNA, 33 bp, Artificial Sequence
  Synthesized
gctcagattgttcctggtatggctcctgctcag

SEQ ID NO: 5994 - DNA, 33 bp, Artificial Sequence
  Synthesized
gctcagattgttcagcagcgttctggtgctcag

SEQ ID NO: 5995 - DNA, 33 bp, Artificial Sequence
  Synthesized
gctcagattgttcgtgataatattaaggctcag

SEQ ID NO: 5996 - DNA, 33 bp, Artificial Sequence
  Synthesized
gctcagattgttcgtggttctggtattgctcag

SEQ ID NO: 5997 - DNA, 33 bp, Artificial Sequence
  Synthesized
gctcagattgtttcttcttctgctaaggctcag

SEQ ID NO: 5998 - DNA, 33 bp, Artificial Sequence
  Synthesized
gctcagattgttgttaatcatgagtctgctcag

SEQ ID NO: 5999 - DNA, 33 bp, Artificial Sequence
  Synthesized
gctcagatttatcattattctgctatggctcag

SEQ ID NO: 6000 - DNA, 33 bp, Artificial Sequence
  Synthesized
gctcagatttatattccttcttttatggctcag

SEQ ID NO: 6001 - DNA, 33 bp, Artificial Sequence
  Synthesized
gctcagatttatttgcctcgtgctaatgctcag

SEQ ID NO: 6002 - DNA, 33 bp, Artificial Sequence
  Synthesized
gctcagatttatttgcctcgttatcatgctcag

SEQ ID NO: 6003 - DNA, 33 bp, Artificial Sequence
  Synthesized
gctcagatttattctgcttctactcctgctcag

SEQ ID NO: 6004 - DNA, 33 bp, Artificial Sequence
  Synthesized
gctcagaaggctgctaatgttttgactgctcag

SEQ ID NO: 6005 - DNA, 33 bp, Artificial Sequence
  Synthesized
gctcagaaggctgctcagtctggtcctgctcag

SEQ ID NO: 6006 - DNA, 33 bp, Artificial Sequence
  Synthesized
gctcagaaggctgcttctttgtcttttgctcag

SEQ ID NO: 6007 - DNA, 33 bp, Artificial Sequence
  Synthesized
gctcagaaggcttttggttcttctgatgctcag

SEQ ID NO: 6008 - DNA, 33 bp, Artificial Sequence
  Synthesized
gctcagaaggctggtactgttatgtctgctcag

SEQ ID NO: 6009 - DNA, 33 bp, Artificial Sequence
  Synthesized
gctcagaaggctcatgttgctgaggttgctcag

SEQ ID NO: 6010 - DNA, 33 bp, Artificial Sequence
  Synthesized
gctcagaaggctttgaagactgatttggctcag

SEQ ID NO: 6011 - DNA, 33 bp, Artificial Sequence
  Synthesized
gctcagaaggctttgatgtctaatgctgctcag

SEQ ID NO: 6012 - DNA, 33 bp, Artificial Sequence
  Synthesized
gctcagaaggcttctaatcatttgtctgctcag

SEQ ID NO: 6013 - DNA, 33 bp, Artificial Sequence
  Synthesized
gctcagaaggctgtttcttcttctgctgctcag

SEQ ID NO: 6014 - DNA, 33 bp, Artificial Sequence
  Synthesized
gctcagaaggctgttgttactactgctgctcag

SEQ ID NO: 6015 - DNA, 33 bp, Artificial Sequence
  Synthesized
gctcagaaggattttatgtctgctatggctcag

SEQ ID NO: 6016 - DNA, 33 bp, Artificial Sequence
  Synthesized
gctcagaaggatatgcagactatgtctgctcag

SEQ ID NO: 6017 - DNA, 33 bp, Artificial Sequence
  Synthesized
gctcagaaggataataagtcttttatggctcag

SEQ ID NO: 6018 - DNA, 33 bp, Artificial Sequence
  Synthesized
gctcagaaggattctcgttcttctgttgctcag

SEQ ID NO: 6019 - DNA, 33 bp, Artificial Sequence
  Synthesized
gctcagaaggaggcttattcttttatggctcag

SEQ ID NO: 6020 - DNA, 33 bp, Artificial Sequence
  Synthesized
gctcagaaggagttgcctcgtatgtatgctcag

SEQ ID NO: 6021 - DNA, 33 bp, Artificial Sequence
  Synthesized
gctcagaaggagttgccttattctcctgctcag

SEQ ID NO: 6022 - DNA, 33 bp, Artificial Sequence
  Synthesized
gctcagaaggagtctgctaaggttttggctcag

SEQ ID NO: 6023 - DNA, 33 bp, Artificial Sequence
  Synthesized
gctcagaagtttcatttttcttttatggctcag

SEQ ID NO: 6024 - DNA, 33 bp, Artificial Sequence
  Synthesized
gctcagaagtttttgcctcgtgttgctgctcag

SEQ ID NO: 6025 - DNA, 33 bp, Artificial Sequence
  Synthesized
gctcagaagggtgcttctgtttctcctgctcag

SEQ ID NO: 6026 - DNA, 33 bp, Artificial Sequence
  Synthesized
gctcagaagggtgatatggctatgattgctcag

SEQ ID NO: 6027 - DNA, 33 bp, Artificial Sequence
  Synthesized
gctcagaagggtaaggaggttatgatggctcag

SEQ ID NO: 6028 - DNA, 33 bp, Artificial Sequence
  Synthesized
gctcagaagggtttgcctggtccttatgctcag

SEQ ID NO: 6029 - DNA, 33 bp, Artificial Sequence
  Synthesized
gctcagaagggtttgcctcgtggtgttgctcag

SEQ ID NO: 6030 - DNA, 33 bp, Artificial Sequence
  Synthesized
gctcagaagggtttgcctcgtcctaaggctcag

SEQ ID NO: 6031 - DNA, 33 bp, Artificial Sequence
  Synthesized
gctcagaagggtttgccttctgttcctgctcag

SEQ ID NO: 6032 - DNA, 33 bp, Artificial Sequence
  Synthesized
gctcagaagggtcagttgatgtctaatgctcag

SEQ ID NO: 6033 - DNA, 33 bp, Artificial Sequence
  Synthesized
gctcagaagggtcgtcattctgctatggctcag

SEQ ID NO: 6034 - DNA, 33 bp, Artificial Sequence
  Synthesized
gctcagaagggttctaagactatttctgctcag

SEQ ID NO: 6035 - DNA, 33 bp, Artificial Sequence
  Synthesized
gctcagaagggttctatgtcttatgttgctcag

SEQ ID NO: 6036 - DNA, 33 bp, Artificial Sequence
  Synthesized
gctcagaagggttctcctatggagaaggctcag

SEQ ID NO: 6037 - DNA, 33 bp, Artificial Sequence
  Synthesized
gctcagaagggtactttttcttttatggctcag

SEQ ID NO: 6038 - DNA, 33 bp, Artificial Sequence
  Synthesized
gctcagaagggtgttcagtcttctgctgctcag

SEQ ID NO: 6039 - DNA, 33 bp, Artificial Sequence
  Synthesized
gctcagaagcatgctgagtcttttatggctcag

SEQ ID NO: 6040 - DNA, 33 bp, Artificial Sequence
  Synthesized
gctcagaagcatgctaagtcttttatggctcag

SEQ ID NO: 6041 - DNA, 33 bp, Artificial Sequence
  Synthesized
gctcagaagcatgcttctaatgttgctgctcag

SEQ ID NO: 6042 - DNA, 33 bp, Artificial Sequence
  Synthesized
gctcagaagcattttaattctcatgaggctcag

SEQ ID NO: 6043 - DNA, 33 bp, Artificial Sequence
  Synthesized
gctcagaagcatttgcctcatgagaaggctcag

SEQ ID NO: 6044 - DNA, 33 bp, Artificial Sequence
  Synthesized
gctcagaagcatttgcctcgtgctattgctcag

SEQ ID NO: 6045 - DNA, 33 bp, Artificial Sequence
  Synthesized
gctcagaagcatttgcctcgtcagcctgctcag

SEQ ID NO: 6046 - DNA, 33 bp, Artificial Sequence
  Synthesized
gctcagaagcatatgattaatacttctgctcag

SEQ ID NO: 6047 - DNA, 33 bp, Artificial Sequence
  Synthesized
gctcagaagattgctggtggtcagtctgctcag

SEQ ID NO: 6048 - DNA, 33 bp, Artificial Sequence
  Synthesized
gctcagaagattgctactttgggttctgctcag

SEQ ID NO: 6049 - DNA, 33 bp, Artificial Sequence
  Synthesized
gctcagaagattttgcctcgtcatttggctcag

SEQ ID NO: 6050 - DNA, 33 bp, Artificial Sequence
  Synthesized
gctcagaagatttctcagcatttgactgctcag

SEQ ID NO: 6051 - DNA, 33 bp, Artificial Sequence
  Synthesized
gctcagaagaaggagaatactttgatggctcag

SEQ ID NO: 6052 - DNA, 33 bp, Artificial Sequence
  Synthesized
gctcagaagaaggagcgtgataaggatgctcag

SEQ ID NO: 6053 - DNA, 33 bp, Artificial Sequence
  Synthesized
gctcagaagaagaagacttctgctatggctcag

SEQ ID NO: 6054 - DNA, 33 bp, Artificial Sequence
  Synthesized
gctcagaagaagttgccttttacttatgctcag

SEQ ID NO: 6055 - DNA, 33 bp, Artificial Sequence
  Synthesized
gctcagaagaagttgcctcctttggttgctcag

SEQ ID NO: 6056 - DNA, 33 bp, Artificial Sequence
  Synthesized
gctcagaagaagttgcctcagggtttggctcag

SEQ ID NO: 6057 - DNA, 33 bp, Artificial Sequence
  Synthesized
gctcagaagaagttgcctcgtatttatgctcag

SEQ ID NO: 6058 - DNA, 33 bp, Artificial Sequence
  Synthesized
gctcagaagaagttgcctcgtcctaaggctcag

SEQ ID NO: 6059 - DNA, 33 bp, Artificial Sequence
  Synthesized
gctcagaagaagttgcctcgtccttatgctcag

SEQ ID NO: 6060 - DNA, 33 bp, Artificial Sequence
  Synthesized
gctcagaagaagcctttttcttttatggctcag

SEQ ID NO: 6061 - DNA, 33 bp, Artificial Sequence
  Synthesized
gctcagaagaagcctaagtcttttatggctcag

SEQ ID NO: 6062 - DNA, 33 bp, Artificial Sequence
  Synthesized
gctcagaagttgggtggttcttttatggctcag

SEQ ID NO: 6063 - DNA, 33 bp, Artificial Sequence
  Synthesized
gctcagaagttgggtaatcgtgatactgctcag

SEQ ID NO: 6064 - DNA, 33 bp, Artificial Sequence
  Synthesized
gctcagaagttgggttctgctcagcctgctcag

SEQ ID NO: 6065 - DNA, 33 bp, Artificial Sequence
  Synthesized
gctcagaagttgttggatcatcattctgctcag

SEQ ID NO: 6066 - DNA, 33 bp, Artificial Sequence
  Synthesized
gctcagaagttgttgcctcgttatgatgctcag

SEQ ID NO: 6067 - DNA, 33 bp, Artificial Sequence
  Synthesized
gctcagaagttgttgccttatcctcctgctcag

SEQ ID NO: 6068 - DNA, 33 bp, Artificial Sequence
  Synthesized
gctcagaagttgttgtcttctcctttggctcag

SEQ ID NO: 6069 - DNA, 33 bp, Artificial Sequence
  Synthesized
gctcagaagttgttggttaattctactgctcag

SEQ ID NO: 6070 - DNA, 33 bp, Artificial Sequence
  Synthesized
gctcagaagttgaatgttactactgctgctcag

SEQ ID NO: 6071 - DNA, 33 bp, Artificial Sequence
  Synthesized
gctcagaagttgcgtactgagactactgctcag

SEQ ID NO: 6072 - DNA, 33 bp, Artificial Sequence
  Synthesized
gctcagaagttgtctcataatgtttctgctcag

SEQ ID NO: 6073 - DNA, 33 bp, Artificial Sequence
  Synthesized
gctcagaagttgtctactgcttctactgctcag

SEQ ID NO: 6074 - DNA, 33 bp, Artificial Sequence
  Synthesized
gctcagaagttgtctactgagaagaatgctcag

SEQ ID NO: 6075 - DNA, 33 bp, Artificial Sequence
  Synthesized
gctcagaagttgactggtattactactgctcag

SEQ ID NO: 6076 - DNA, 33 bp, Artificial Sequence
  Synthesized
gctcagaagttgactaatccttatgctgctcag

SEQ ID NO: 6077 - DNA, 33 bp, Artificial Sequence
  Synthesized
gctcagaagttggttgttcctaaggatgctcag

SEQ ID NO: 6078 - DNA, 33 bp, Artificial Sequence
  Synthesized
gctcagaagatggctcctcagttgactgctcag

SEQ ID NO: 6079 - DNA, 33 bp, Artificial Sequence
  Synthesized
gctcagaagatggagcgtttgtctcctgctcag

SEQ ID NO: 6080 - DNA, 33 bp, Artificial Sequence
  Synthesized
gctcagaagatgattggtggttctcaggctcag

SEQ ID NO: 6081 - DNA, 33 bp, Artificial Sequence
  Synthesized
gctcagaagatgcagacttctcctttggctcag

SEQ ID NO: 6082 - DNA, 33 bp, Artificial Sequence
  Synthesized
gctcagaagatgactttggtttctgctgctcag

SEQ ID NO: 6083 - DNA, 33 bp, Artificial Sequence
  Synthesized
gctcagaagatgactactactggtgatgctcag

SEQ ID NO: 6084 - DNA, 33 bp, Artificial Sequence
  Synthesized
gctcagaagaatgctactcgtcataatgctcag

SEQ ID NO: 6085 - DNA, 33 bp, Artificial Sequence
  Synthesized
gctcagaagaattgttcttatactgttgctcag

SEQ ID NO: 6086 - DNA, 33 bp, Artificial Sequence
  Synthesized
gctcagaagaattttactcgttattctgctcag

SEQ ID NO: 6087 - DNA, 33 bp, Artificial Sequence
  Synthesized
gctcagaagaatggtactcgtggtttggctcag

SEQ ID NO: 6088 - DNA, 33 bp, Artificial Sequence
  Synthesized
gctcagaagaatggtactcgtcagcaggctcag

SEQ ID NO: 6089 - DNA, 33 bp, Artificial Sequence
  Synthesized
gctcagaagaatcatggtgatttgcctgctcag

SEQ ID NO: 6090 - DNA, 33 bp, Artificial Sequence
  Synthesized
gctcagaagaatcatactcgtggtaaggctcag

SEQ ID NO: 6091 - DNA, 33 bp, Artificial Sequence
  Synthesized
gctcagaagaatcatactcgtcctggtgctcag

SEQ ID NO: 6092 - DNA, 33 bp, Artificial Sequence
  Synthesized
gctcagaagaatcatactcgttattctgctcag

SEQ ID NO: 6093 - DNA, 33 bp, Artificial Sequence
  Synthesized
gctcagaagaatattactcgtcatgaggctcag

SEQ ID NO: 6094 - DNA, 33 bp, Artificial Sequence
  Synthesized
gctcagaagaatattactcgtcatggtgctcag

SEQ ID NO: 6095 - DNA, 33 bp, Artificial Sequence
  Synthesized
gctcagaagaataagactcgtcgtaaggctcag

SEQ ID NO: 6096 - DNA, 33 bp, Artificial Sequence
  Synthesized
gctcagaagaatttggatcctgttactgctcag

SEQ ID NO: 6097 - DNA, 33 bp, Artificial Sequence
  Synthesized
gctcagaagaatttgcctactattattgctcag

SEQ ID NO: 6098 - DNA, 33 bp, Artificial Sequence
  Synthesized
gctcagaagaatatgactcgttatggtgctcag

SEQ ID NO: 6099 - DNA, 33 bp, Artificial Sequence
  Synthesized
gctcagaagaataatgctgctcctgctgctcag

SEQ ID NO: 6100 - DNA, 33 bp, Artificial Sequence
  Synthesized
gctcagaagaataatactgaggagcatgctcag

SEQ ID NO: 6101 - DNA, 33 bp, Artificial Sequence
  Synthesized
gctcagaagaataatactggtgagtatgctcag

SEQ ID NO: 6102 - DNA, 33 bp, Artificial Sequence
  Synthesized
gctcagaagaataatactcataaggctgctcag

SEQ ID NO: 6103 - DNA, 33 bp, Artificial Sequence
  Synthesized
gctcagaagaataatactcatactcctgctcag

SEQ ID NO: 6104 - DNA, 33 bp, Artificial Sequence
  Synthesized
gctcagaagaataatactaatgatttggctcag

SEQ ID NO: 6105 - DNA, 33 bp, Artificial Sequence
  Synthesized
gctcagaagaataatactcagtctaaggctcag

SEQ ID NO: 6106 - DNA, 33 bp, Artificial Sequence
  Synthesized
gctcagaagaataatactcgtaagttggctcag

SEQ ID NO: 6107 - DNA, 33 bp, Artificial Sequence
  Synthesized
gctcagaagaataatactacttatatggctcag

SEQ ID NO: 6108 - DNA, 33 bp, Artificial Sequence
  Synthesized
gctcagaagaataatactgttaagcgtgctcag

SEQ ID NO: 6109 - DNA, 33 bp, Artificial Sequence
  Synthesized
gctcagaagaataatacttattttattgctcag

SEQ ID NO: 6110 - DNA, 33 bp, Artificial Sequence
  Synthesized
gctcagaagaataatacttattatcatgctcag

SEQ ID NO: 6111 - DNA, 33 bp, Artificial Sequence
  Synthesized
gctcagaagaatccttttaagttttctgctcag

SEQ ID NO: 6112 - DNA, 33 bp, Artificial Sequence
  Synthesized
gctcagaagaatcctcatcgtttttctgctcag

SEQ ID NO: 6113 - DNA, 33 bp, Artificial Sequence
  Synthesized
gctcagaagaatcctcattatccttctgctcag

SEQ ID NO: 6114 - DNA, 33 bp, Artificial Sequence
  Synthesized
gctcagaagaatcctaagggtcattctgctcag

SEQ ID NO: 6115 - DNA, 33 bp, Artificial Sequence
  Synthesized
gctcagaagaatcctatgcgtaattctgctcag

SEQ ID NO: 6116 - DNA, 33 bp, Artificial Sequence
  Synthesized
gctcagaagaatcctcgtcatccttctgctcag

SEQ ID NO: 6117 - DNA, 33 bp, Artificial Sequence
  Synthesized
gctcagaagaatcctactttgaattctgctcag

SEQ ID NO: 6118 - DNA, 33 bp, Artificial Sequence
  Synthesized
gctcagaagaatcctgttgctcgttctgctcag

SEQ ID NO: 6119 - DNA, 33 bp, Artificial Sequence
  Synthesized
gctcagaagaatcctgttggtgattctgctcag

SEQ ID NO: 6120 - DNA, 33 bp, Artificial Sequence
  Synthesized
gctcagaagaatcctgttggtcgttctgctcag

SEQ ID NO: 6121 - DNA, 33 bp, Artificial Sequence
  Synthesized
gctcagaagaatcctgttcatcgttctgctcag

SEQ ID NO: 6122 - DNA, 33 bp, Artificial Sequence
  Synthesized
gctcagaagaatcctgttaagcgttctgctcag

SEQ ID NO: 6123 - DNA, 33 bp, Artificial Sequence
  Synthesized
gctcagaagaatcctgttatgcgttctgctcag

SEQ ID NO: 6124 - DNA, 33 bp, Artificial Sequence
  Synthesized
gctcagaagaatcctgttcagcgttctgctcag

SEQ ID NO: 6125 - DNA, 33 bp, Artificial Sequence
  Synthesized
gctcagaagaatcctgtttatcgttctgctcag

SEQ ID NO: 6126 - DNA, 33 bp, Artificial Sequence
  Synthesized
gctcagaagaatcagactcgtccttttgctcag

SEQ ID NO: 6127 - DNA, 33 bp, Artificial Sequence
  Synthesized
gctcagaagaattctactcgtggttatgctcag

SEQ ID NO: 6128 - DNA, 33 bp, Artificial Sequence
  Synthesized
gctcagaagaatactactcgttatcgtgctcag

SEQ ID NO: 6129 - DNA, 33 bp, Artificial Sequence
  Synthesized
gctcagaagaatgttactcgtgcttctgctcag

SEQ ID NO: 6130 - DNA, 33 bp, Artificial Sequence
  Synthesized
gctcagaagcctgctgctggtcatactgctcag

SEQ ID NO: 6131 - DNA, 33 bp, Artificial Sequence
  Synthesized
gctcagaagcctgaggctttgtcttctgctcag

SEQ ID NO: 6132 - DNA, 33 bp, Artificial Sequence
  Synthesized
gctcagaagcctttggatgttaatcatgctcag

SEQ ID NO: 6133 - DNA, 33 bp, Artificial Sequence
  Synthesized
gctcagaagcctttgcctggtaatcatgctcag

SEQ ID NO: 6134 - DNA, 33 bp, Artificial Sequence
  Synthesized
gctcagaagcctttgcctcgtgtttatgctcag

SEQ ID NO: 6135 - DNA, 33 bp, Artificial Sequence
  Synthesized
gctcagaagcctttgtattcttttatggctcag

SEQ ID NO: 6136 - DNA, 33 bp, Artificial Sequence
  Synthesized
gctcagaagcctcctttgatgtctcaggctcag

SEQ ID NO: 6137 - DNA, 33 bp, Artificial Sequence
  Synthesized
gctcagaagcctcctccttcttttatggctcag

SEQ ID NO: 6138 - DNA, 33 bp, Artificial Sequence
  Synthesized
gctcagaagcctccttctttgattgatgctcag

SEQ ID NO: 6139 - DNA, 33 bp, Artificial Sequence
  Synthesized
gctcagaagcctcagactaatcctactgctcag

SEQ ID NO: 6140 - DNA, 33 bp, Artificial Sequence
  Synthesized
gctcagaagccttctgttcctaatgttgctcag

SEQ ID NO: 6141 - DNA, 33 bp, Artificial Sequence
  Synthesized
gctcagaagcctactatggatgttaaggctcag

SEQ ID NO: 6142 - DNA, 33 bp, Artificial Sequence
  Synthesized
gctcagaagcctgtttctttgtctgctgctcag

SEQ ID NO: 6143 - DNA, 33 bp, Artificial Sequence
  Synthesized
gctcagaagcagttgcctcattattatgctcag

SEQ ID NO: 6144 - DNA, 33 bp, Artificial Sequence
  Synthesized
gctcagaagcagttgcctcgttataaggctcag

SEQ ID NO: 6145 - DNA, 33 bp, Artificial Sequence
  Synthesized
gctcagaagcagttgactggtactattgctcag

SEQ ID NO: 6146 - DNA, 33 bp, Artificial Sequence
  Synthesized
gctcagaagcagaatgatgttggttctgctcag

SEQ ID NO: 6147 - DNA, 33 bp, Artificial Sequence
  Synthesized
gctcagaagcagcctcctggtttgggtgctcag

SEQ ID NO: 6148 - DNA, 33 bp, Artificial Sequence
  Synthesized
gctcagaagcagcgtgatttgtctgctgctcag

SEQ ID NO: 6149 - DNA, 33 bp, Artificial Sequence
  Synthesized
gctcagaagcagtctgatttgaatcgtgctcag

SEQ ID NO: 6150 - DNA, 33 bp, Artificial Sequence
  Synthesized
gctcagaagcagtctgtttctttgactgctcag

SEQ ID NO: 6151 - DNA, 33 bp, Artificial Sequence
  Synthesized
gctcagaagcagtatcagcagcatgttgctcag

SEQ ID NO: 6152 - DNA, 33 bp, Artificial Sequence
  Synthesized
gctcagaagcgtgctcagtcttttatggctcag

SEQ ID NO: 6153 - DNA, 33 bp, Artificial Sequence
  Synthesized
gctcagaagcgtttgcctgtttctgatgctcag

SEQ ID NO: 6154 - DNA, 33 bp, Artificial Sequence
  Synthesized
gctcagaagcgtcctgttcctgctgaggctcag

SEQ ID NO: 6155 - DNA, 33 bp, Artificial Sequence
  Synthesized
gctcagaagtctgctttgcgttctggtgctcag

SEQ ID NO: 6156 - DNA, 33 bp, Artificial Sequence
  Synthesized
gctcagaagtctgagcatgctgaggttgctcag

SEQ ID NO: 6157 - DNA, 33 bp, Artificial Sequence
  Synthesized
gctcagaagtctgagatgggtcatcgtgctcag

SEQ ID NO: 6158 - DNA, 33 bp, Artificial Sequence
  Synthesized
gctcagaagtctggtattgtttctgctgctcag

SEQ ID NO: 6159 - DNA, 33 bp, Artificial Sequence
  Synthesized
gctcagaagtctggtcagcctggtcctgctcag

SEQ ID NO: 6160 - DNA, 33 bp, Artificial Sequence
  Synthesized
gctcagaagtctcattctcctggtgttgctcag

SEQ ID NO: 6161 - DNA, 33 bp, Artificial Sequence
  Synthesized
gctcagaagtctattaatcctaatcctgctcag

SEQ ID NO: 6162 - DNA, 33 bp, Artificial Sequence
  Synthesized
gctcagaagtctaagggtgatgctgctgctcag

SEQ ID NO: 6163 - DNA, 33 bp, Artificial Sequence
  Synthesized
gctcagaagtctttggatcgtgagaaggctcag

SEQ ID NO: 6164 - DNA, 33 bp, Artificial Sequence
  Synthesized
gctcagaagtctttgcctcattttcgtgctcag

SEQ ID NO: 6165 - DNA, 33 bp, Artificial Sequence
  Synthesized
gctcagaagtctttgcctttggatgttgctcag

SEQ ID NO: 6166 - DNA, 33 bp, Artificial Sequence
  Synthesized
gctcagaagtctttgcctcgtatgcatgctcag

SEQ ID NO: 6167 - DNA, 33 bp, Artificial Sequence
  Synthesized
gctcagaagtctttgcgtgatcagtctgctcag

SEQ ID NO: 6168 - DNA, 33 bp, Artificial Sequence
  Synthesized
gctcagaagtctttgactgatgttactgctcag

SEQ ID NO: 6169 - DNA, 33 bp, Artificial Sequence
  Synthesized
gctcagaagtctatgactattcctcaggctcag

SEQ ID NO: 6170 - DNA, 33 bp, Artificial Sequence
  Synthesized
gctcagaagtctaatttgtcttctcaggctcag

SEQ ID NO: 6171 - DNA, 33 bp, Artificial Sequence
  Synthesized
gctcagaagtctaatatgcagaatactgctcag

SEQ ID NO: 6172 - DNA, 33 bp, Artificial Sequence
  Synthesized
gctcagaagtctaattctcagtatactgctcag

SEQ ID NO: 6173 - DNA, 33 bp, Artificial Sequence
  Synthesized
gctcagaagtctcagcctttgtcttatgctcag

SEQ ID NO: 6174 - DNA, 33 bp, Artificial Sequence
  Synthesized
gctcagaagtctcagtctttggctggtgctcag

SEQ ID NO: 6175 - DNA, 33 bp, Artificial Sequence
  Synthesized
gctcagaagtcttctgctttgaatcaggctcag

SEQ ID NO: 6176 - DNA, 33 bp, Artificial Sequence
  Synthesized
gctcagaagtcttctcctggtcagcctgctcag

SEQ ID NO: 6177 - DNA, 33 bp, Artificial Sequence
  Synthesized
gctcagaagtctactactactggtcgtgctcag

SEQ ID NO: 6178 - DNA, 33 bp, Artificial Sequence
  Synthesized
gctcagaagtctacttatttgggtatggctcag

SEQ ID NO: 6179 - DNA, 33 bp, Artificial Sequence
  Synthesized
gctcagaagactgctgttggtgctaatgctcag

SEQ ID NO: 6180 - DNA, 33 bp, Artificial Sequence
  Synthesized
gctcagaagactggtcatgttatgcctgctcag

SEQ ID NO: 6181 - DNA, 33 bp, Artificial Sequence
  Synthesized
gctcagaagactggtacttctatgaatgctcag

SEQ ID NO: 6182 - DNA, 33 bp, Artificial Sequence
  Synthesized
gctcagaagactggttattcttctttggctcag

SEQ ID NO: 6183 - DNA, 33 bp, Artificial Sequence
  Synthesized
gctcagaagactttgcctcgtaagcatgctcag

SEQ ID NO: 6184 - DNA, 33 bp, Artificial Sequence
  Synthesized
gctcagaagactatgtctgctcctgctgctcag

SEQ ID NO: 6185 - DNA, 33 bp, Artificial Sequence
  Synthesized
gctcagaagactaatccttcttttatggctcag

SEQ ID NO: 6186 - DNA, 33 bp, Artificial Sequence
  Synthesized
gctcagaagactcctgagtcttctcgtgctcag

SEQ ID NO: 6187 - DNA, 33 bp, Artificial Sequence
  Synthesized
gctcagaagactcctaattcttttatggctcag

SEQ ID NO: 6188 - DNA, 33 bp, Artificial Sequence
  Synthesized
gctcagaagactactaatcattcttctgctcag

SEQ ID NO: 6189 - DNA, 33 bp, Artificial Sequence
  Synthesized
gctcagaagactacttctgctcctttggctcag

SEQ ID NO: 6190 - DNA, 33 bp, Artificial Sequence
  Synthesized
gctcagaagacttatggtgctactaatgctcag

SEQ ID NO: 6191 - DNA, 33 bp, Artificial Sequence
  Synthesized
gctcagaaggttgatgctgatttgttggctcag

SEQ ID NO: 6192 - DNA, 33 bp, Artificial Sequence
  Synthesized
gctcagaaggttggtgctttgtctgttgctcag

SEQ ID NO: 6193 - DNA, 33 bp, Artificial Sequence
  Synthesized
gctcagaaggttggtactcatacttctgctcag

SEQ ID NO: 6194 - DNA, 33 bp, Artificial Sequence
  Synthesized
gctcagaaggttaatccttctcctactgctcag

SEQ ID NO: 6195 - DNA, 33 bp, Artificial Sequence
  Synthesized
gctcagaaggttcctggttttggttctgctcag

SEQ ID NO: 6196 - DNA, 33 bp, Artificial Sequence
  Synthesized
gctcagaaggttcagcgttcttttatggctcag

SEQ ID NO: 6197 - DNA, 33 bp, Artificial Sequence
  Synthesized
gctcagaaggttcaggtttcttctgctgctcag

SEQ ID NO: 6198 - DNA, 33 bp, Artificial Sequence
  Synthesized
gctcagaaggtttcttctgttggtcctgctcag

SEQ ID NO: 6199 - DNA, 33 bp, Artificial Sequence
  Synthesized
gctcagaaggttactgctatgaatgctgctcag

SEQ ID NO: 6200 - DNA, 33 bp, Artificial Sequence
  Synthesized
gctcagaaggttactggtacttattctgctcag

SEQ ID NO: 6201 - DNA, 33 bp, Artificial Sequence
  Synthesized
gctcagaagtatcatgagtcttttatggctcag

SEQ ID NO: 6202 - DNA, 33 bp, Artificial Sequence
  Synthesized
gctcagaagtatttgcctattgttgaggctcag

SEQ ID NO: 6203 - DNA, 33 bp, Artificial Sequence
  Synthesized
gctcagaagtatttgcctcgtttggaggctcag

SEQ ID NO: 6204 - DNA, 33 bp, Artificial Sequence
  Synthesized
gctcagaagtatcctggttcttttatggctcag

SEQ ID NO: 6205 - DNA, 33 bp, Artificial Sequence
  Synthesized
gctcagaagtatcagcagaattcttctgctcag

SEQ ID NO: 6206 - DNA, 33 bp, Artificial Sequence
  Synthesized
gctcagttggctgctatgttgacttctgctcag

SEQ ID NO: 6207 - DNA, 33 bp, Artificial Sequence
  Synthesized
gctcagttggctgctaataatcgtaatgctcag

SEQ ID NO: 6208 - DNA, 33 bp, Artificial Sequence
  Synthesized
gctcagttggctgctcagatgaataaggctcag

SEQ ID NO: 6209 - DNA, 33 bp, Artificial Sequence
  Synthesized
gctcagttggctgcttctaattctcctgctcag

SEQ ID NO: 6210 - DNA, 33 bp, Artificial Sequence
  Synthesized
gctcagttggctgatgcttctcgttatgctcag

SEQ ID NO: 6211 - DNA, 33 bp, Artificial Sequence
  Synthesized
gctcagttggctgatcatcgtatgatggctcag

SEQ ID NO: 6212 - DNA, 33 bp, Artificial Sequence
  Synthesized
gctcagttggctgataagaagattactgctcag

SEQ ID NO: 6213 - DNA, 33 bp, Artificial Sequence
  Synthesized
gctcagttggctggtcaggttcgtgttgctcag

SEQ ID NO: 6214 - DNA, 33 bp, Artificial Sequence
  Synthesized
gctcagttggctggttctaatactttggctcag

SEQ ID NO: 6215 - DNA, 33 bp, Artificial Sequence
  Synthesized
gctcagttggctaagaatgttcctactgctcag

SEQ ID NO: 6216 - DNA, 33 bp, Artificial Sequence
  Synthesized
gctcagttggctaagacttctcagactgctcag

SEQ ID NO: 6217 - DNA, 33 bp, Artificial Sequence
  Synthesized
gctcagttggctttgtctactaagtctgctcag

SEQ ID NO: 6218 - DNA, 33 bp, Artificial Sequence
  Synthesized
gctcagttggctaatcgttctttggatgctcag

SEQ ID NO: 6219 - DNA, 33 bp, Artificial Sequence
  Synthesized
gctcagttggctccttctgagacttctgctcag

SEQ ID NO: 6220 - DNA, 33 bp, Artificial Sequence
  Synthesized
gctcagttggctcgtcatgagtcttctgctcag

SEQ ID NO: 6221 - DNA, 33 bp, Artificial Sequence
  Synthesized
gctcagttggctcgtcatccttctattgctcag

SEQ ID NO: 6222 - DNA, 33 bp, Artificial Sequence
  Synthesized
gctcagttggctcgtaatcagtctgatgctcag

SEQ ID NO: 6223 - DNA, 33 bp, Artificial Sequence
  Synthesized
gctcagttggctcgtcctttggctaatgctcag

SEQ ID NO: 6224 - DNA, 33 bp, Artificial Sequence
  Synthesized
gctcagttggctcgttctgttgctgctgctcag

SEQ ID NO: 6225 - DNA, 33 bp, Artificial Sequence
  Synthesized
gctcagttggctcgtactactactgatgctcag

SEQ ID NO: 6226 - DNA, 33 bp, Artificial Sequence
  Synthesized
gctcagttggcttctggtcctaagaatgctcag

SEQ ID NO: 6227 - DNA, 33 bp, Artificial Sequence
  Synthesized
gctcagttggcttctcctcgtgatcgtgctcag

SEQ ID NO: 6228 - DNA, 33 bp, Artificial Sequence
  Synthesized
gctcagttggcttctcgtgatgctatggctcag

SEQ ID NO: 6229 - DNA, 33 bp, Artificial Sequence
  Synthesized
gctcagttggcttctcgtcctactttggctcag

SEQ ID NO: 6230 - DNA, 33 bp, Artificial Sequence
  Synthesized
gctcagttggcttcttctggtgttttggctcag

SEQ ID NO: 6231 - DNA, 33 bp, Artificial Sequence
  Synthesized
gctcagttggcttcttctttgaatgttgctcag

SEQ ID NO: 6232 - DNA, 33 bp, Artificial Sequence
  Synthesized
gctcagttggcttcttctatgcattctgctcag

SEQ ID NO: 6233 - DNA, 33 bp, Artificial Sequence
  Synthesized
gctcagttggctactgctggtattattgctcag

SEQ ID NO: 6234 - DNA, 33 bp, Artificial Sequence
  Synthesized
gctcagttggctactcgtggtgctcctgctcag

SEQ ID NO: 6235 - DNA, 33 bp, Artificial Sequence
  Synthesized
gctcagttggctgttgttgctactgttgctcag

SEQ ID NO: 6236 - DNA, 33 bp, Artificial Sequence
  Synthesized
gctcagttggataagtatcgttctaatgctcag

SEQ ID NO: 6237 - DNA, 33 bp, Artificial Sequence
  Synthesized
gctcagttggattctaagcgtccttctgctcag

SEQ ID NO: 6238 - DNA, 33 bp, Artificial Sequence
  Synthesized
gctcagttggattctaagcgtacttatgctcag

SEQ ID NO: 6239 - DNA, 33 bp, Artificial Sequence
  Synthesized
gctcagttggattctcagatggctgttgctcag

SEQ ID NO: 6240 - DNA, 33 bp, Artificial Sequence
  Synthesized
gctcagttggaggagcagaagcaggaggctcag

SEQ ID NO: 6241 - DNA, 33 bp, Artificial Sequence
  Synthesized
gctcagttggagtttcgttcttttatggctcag

SEQ ID NO: 6242 - DNA, 33 bp, Artificial Sequence
  Synthesized
gctcagttggagcatcctaatcgtttggctcag

SEQ ID NO: 6243 - DNA, 33 bp, Artificial Sequence
  Synthesized
gctcagttggagttgcctcgtttttttgctcag

SEQ ID NO: 6244 - DNA, 33 bp, Artificial Sequence
  Synthesized
gctcagttggagttgcctcgttttcgtgctcag

SEQ ID NO: 6245 - DNA, 33 bp, Artificial Sequence
  Synthesized
gctcagttggagatgaagactactttggctcag

SEQ ID NO: 6246 - DNA, 33 bp, Artificial Sequence
  Synthesized
gctcagttggagcgtcctactattaatgctcag

SEQ ID NO: 6247 - DNA, 33 bp, Artificial Sequence
  Synthesized
gctcagttggagcgtgttaagcagactgctcag

SEQ ID NO: 6248 - DNA, 33 bp, Artificial Sequence
  Synthesized
gctcagttgtttgaggttcgtactactgctcag

SEQ ID NO: 6249 - DNA, 33 bp, Artificial Sequence
  Synthesized
gctcagttgtttttgcctcctcctcctgctcag

SEQ ID NO: 6250 - DNA, 33 bp, Artificial Sequence
  Synthesized
gctcagttgttttctaatactcagaatgctcag

SEQ ID NO: 6251 - DNA, 33 bp, Artificial Sequence
  Synthesized
gctcagttgggtgcttctgttcgtaatgctcag

SEQ ID NO: 6252 - DNA, 33 bp, Artificial Sequence
  Synthesized
gctcagttgggtgatttgattcgttctgctcag

SEQ ID NO: 6253 - DNA, 33 bp, Artificial Sequence
  Synthesized
gctcagttgggtggtttgcgttctgttgctcag

SEQ ID NO: 6254 - DNA, 33 bp, Artificial Sequence
  Synthesized
gctcagttgggtggtcgttctgctatggctcag

SEQ ID NO: 6255 - DNA, 33 bp, Artificial Sequence
  Synthesized
gctcagttgggtggttattcttctactgctcag

SEQ ID NO: 6256 - DNA, 33 bp, Artificial Sequence
  Synthesized
gctcagttgggtcattcttcttctttggctcag

SEQ ID NO: 6257 - DNA, 33 bp, Artificial Sequence
  Synthesized
gctcagttgggtattattcagggtcctgctcag

SEQ ID NO: 6258 - DNA, 33 bp, Artificial Sequence
  Synthesized
gctcagttgggtattaatttgattcaggctcag

SEQ ID NO: 6259 - DNA, 33 bp, Artificial Sequence
  Synthesized
gctcagttgggtatttctaatgttgttgctcag

SEQ ID NO: 6260 - DNA, 33 bp, Artificial Sequence
  Synthesized
gctcagttgggtaaggctattaatgttgctcag

SEQ ID NO: 6261 - DNA, 33 bp, Artificial Sequence
  Synthesized
gctcagttgggtaagtttaatcaggatgctcag

SEQ ID NO: 6262 - DNA, 33 bp, Artificial Sequence
  Synthesized
gctcagttgggtttggagcgtaatactgctcag

SEQ ID NO: 6263 - DNA, 33 bp, Artificial Sequence
  Synthesized
gctcagttgggtttgcctcgtcctggtgctcag

SEQ ID NO: 6264 - DNA, 33 bp, Artificial Sequence
  Synthesized
gctcagttgggtttgtctattactgctgctcag

SEQ ID NO: 6265 - DNA, 33 bp, Artificial Sequence
  Synthesized
gctcagttgggtaatgagaagatggttgctcag

SEQ ID NO: 6266 - DNA, 33 bp, Artificial Sequence
  Synthesized
gctcagttgggtaatcgttttttgtctgctcag

SEQ ID NO: 6267 - DNA, 33 bp, Artificial Sequence
  Synthesized
gctcagttgggtccttcttctcctcgtgctcag

SEQ ID NO: 6268 - DNA, 33 bp, Artificial Sequence
  Synthesized
gctcagttgggtcagcatacttctcgtgctcag

SEQ ID NO: 6269 - DNA, 33 bp, Artificial Sequence
  Synthesized
gctcagttgggtcgtgataagtctactgctcag

SEQ ID NO: 6270 - DNA, 33 bp, Artificial Sequence
  Synthesized
gctcagttgggtcgtttgaatcaggatgctcag

SEQ ID NO: 6271 - DNA, 33 bp, Artificial Sequence
  Synthesized
gctcagttgggtcgtaatgctgttcctgctcag

SEQ ID NO: 6272 - DNA, 33 bp, Artificial Sequence
  Synthesized
gctcagttgggtcgttctgatttgtctgctcag

SEQ ID NO: 6273 - DNA, 33 bp, Artificial Sequence
  Synthesized
gctcagttgggtcgtactgctttgaatgctcag

SEQ ID NO: 6274 - DNA, 33 bp, Artificial Sequence
  Synthesized
gctcagttgggttctgatgagggtatggctcag

SEQ ID NO: 6275 - DNA, 33 bp, Artificial Sequence
  Synthesized
gctcagttgggttctttgtctgagaaggctcag

SEQ ID NO: 6276 - DNA, 33 bp, Artificial Sequence
  Synthesized
gctcagttgggttctcagtctttgcaggctcag

SEQ ID NO: 6277 - DNA, 33 bp, Artificial Sequence
  Synthesized
gctcagttgggttctcgtaatattactgctcag

SEQ ID NO: 6278 - DNA, 33 bp, Artificial Sequence
  Synthesized
gctcagttgggtactaatcagcagcgtgctcag

SEQ ID NO: 6279 - DNA, 33 bp, Artificial Sequence
  Synthesized
gctcagttgggtactcgttctggttctgctcag

SEQ ID NO: 6280 - DNA, 33 bp, Artificial Sequence
  Synthesized
gctcagttgggtgttgttgatggtgatgctcag

SEQ ID NO: 6281 - DNA, 33 bp, Artificial Sequence
  Synthesized
gctcagttgcattttggttcttttatggctcag

SEQ ID NO: 6282 - DNA, 33 bp, Artificial Sequence
  Synthesized
gctcagttgcattttcattctgctatggctcag

SEQ ID NO: 6283 - DNA, 33 bp, Artificial Sequence
  Synthesized
gctcagttgcatggtactactaatatggctcag

SEQ ID NO: 6284 - DNA, 33 bp, Artificial Sequence
  Synthesized
gctcagttgcatttgcctgcttatcctgctcag

SEQ ID NO: 6285 - DNA, 33 bp, Artificial Sequence
  Synthesized
gctcagttgcataatcctcgtaattctgctcag

SEQ ID NO: 6286 - DNA, 33 bp, Artificial Sequence
  Synthesized
gctcagttgcatcagactcgtggtgttgctcag

SEQ ID NO: 6287 - DNA, 33 bp, Artificial Sequence
  Synthesized
gctcagttgcatcgtacttcttctcctgctcag

SEQ ID NO: 6288 - DNA, 33 bp, Artificial Sequence
  Synthesized
gctcagttgcattctgctgtttcttctgctcag

SEQ ID NO: 6289 - DNA, 33 bp, Artificial Sequence
  Synthesized
gctcagttgcattctggttctgctatggctcag

SEQ ID NO: 6290 - DNA, 33 bp, Artificial Sequence
  Synthesized
gctcagttgcattctcgtccttctactgctcag

SEQ ID NO: 6291 - DNA, 33 bp, Artificial Sequence
  Synthesized
gctcagttgcatactcctggtaatcgtgctcag

SEQ ID NO: 6292 - DNA, 33 bp, Artificial Sequence
  Synthesized
gctcagttgcatacttctcctaataaggctcag

SEQ ID NO: 6293 - DNA, 33 bp, Artificial Sequence
  Synthesized
gctcagttgattgctactcaggatcgtgctcag

SEQ ID NO: 6294 - DNA, 33 bp, Artificial Sequence
  Synthesized
gctcagttgattcctatgactactgctgctcag

SEQ ID NO: 6295 - DNA, 33 bp, Artificial Sequence
  Synthesized
gctcagttgattactcataattcttctgctcag

SEQ ID NO: 6296 - DNA, 33 bp, Artificial Sequence
  Synthesized
gctcagttgattactaataaggctaatgctcag

SEQ ID NO: 6297 - DNA, 33 bp, Artificial Sequence
  Synthesized
gctcagttgaaggctggttctgttactgctcag

SEQ ID NO: 6298 - DNA, 33 bp, Artificial Sequence
  Synthesized
gctcagttgaaggctcgtcctttggatgctcag

SEQ ID NO: 6299 - DNA, 33 bp, Artificial Sequence
  Synthesized
gctcagttgaaggaggcttctatgaaggctcag

SEQ ID NO: 6300 - DNA, 33 bp, Artificial Sequence
  Synthesized
gctcagttgaaggagaagtctttgcaggctcag

SEQ ID NO: 6301 - DNA, 33 bp, Artificial Sequence
  Synthesized
gctcagttgaagggtactgctaataatgctcag

SEQ ID NO: 6302 - DNA, 33 bp, Artificial Sequence
  Synthesized
gctcagttgaagggtactccttctttggctcag

SEQ ID NO: 6303 - DNA, 33 bp, Artificial Sequence
  Synthesized
gctcagttgaagggtgttattcatgatgctcag

SEQ ID NO: 6304 - DNA, 33 bp, Artificial Sequence
  Synthesized
gctcagttgaagcatcctgcttctttggctcag

SEQ ID NO: 6305 - DNA, 33 bp, Artificial Sequence
  Synthesized
gctcagttgaagttggagtctactactgctcag

SEQ ID NO: 6306 - DNA, 33 bp, Artificial Sequence
  Synthesized
gctcagttgaagttgcctcgtcatggtgctcag

SEQ ID NO: 6307 - DNA, 33 bp, Artificial Sequence
  Synthesized
gctcagttgaagaatgctgttaataatgctcag

SEQ ID NO: 6308 - DNA, 33 bp, Artificial Sequence
  Synthesized
gctcagttgaagaatattactttgcaggctcag

SEQ ID NO: 6309 - DNA, 33 bp, Artificial Sequence
  Synthesized
gctcagttgaagaatcagactatgtctgctcag

SEQ ID NO: 6310 - DNA, 33 bp, Artificial Sequence
  Synthesized
gctcagttgaagcctgttaatttgggtgctcag

SEQ ID NO: 6311 - DNA, 33 bp, Artificial Sequence
  Synthesized
gctcagttgaagtctggtttgtctaatgctcag

SEQ ID NO: 6312 - DNA, 33 bp, Artificial Sequence
  Synthesized
gctcagttgaagtctactggtgctcctgctcag

SEQ ID NO: 6313 - DNA, 33 bp, Artificial Sequence
  Synthesized
gctcagttgaagactgctcatttttctgctcag

SEQ ID NO: 6314 - DNA, 33 bp, Artificial Sequence
  Synthesized
gctcagttgaagactatgtctcctaatgctcag

SEQ ID NO: 6315 - DNA, 33 bp, Artificial Sequence
  Synthesized
gctcagttgaagactaattctatgcctgctcag

SEQ ID NO: 6316 - DNA, 33 bp, Artificial Sequence
  Synthesized
gctcagttgaagactactaagatttctgctcag

SEQ ID NO: 6317 - DNA, 33 bp, Artificial Sequence
  Synthesized
gctcagttgaagactgttttggagaaggctcag

SEQ ID NO: 6318 - DNA, 33 bp, Artificial Sequence
  Synthesized
gctcagttgttgggtcgttctaatcctgctcag

SEQ ID NO: 6319 - DNA, 33 bp, Artificial Sequence
  Synthesized
gctcagttgttgcatcagtcttttatggctcag

SEQ ID NO: 6320 - DNA, 33 bp, Artificial Sequence
  Synthesized
gctcagttgttgaaggctggtgttactgctcag

SEQ ID NO: 6321 - DNA, 33 bp, Artificial Sequence
  Synthesized
gctcagttgttgaaggaggttgctgatgctcag

SEQ ID NO: 6322 - DNA, 33 bp, Artificial Sequence
  Synthesized
gctcagttgttgcctcatgctttgtctgctcag

SEQ ID NO: 6323 - DNA, 33 bp, Artificial Sequence
  Synthesized
gctcagttgttgcctaatatgcgtggtgctcag

SEQ ID NO: 6324 - DNA, 33 bp, Artificial Sequence
  Synthesized
gctcagttgttgcctcctcatcaggctgctcag

SEQ ID NO: 6325 - DNA, 33 bp, Artificial Sequence
  Synthesized
gctcagttgttgcaggctactgatattgctcag

SEQ ID NO: 6326 - DNA, 33 bp, Artificial Sequence
  Synthesized
gctcagttgttgcgtaaggatgctactgctcag

SEQ ID NO: 6327 - DNA, 33 bp, Artificial Sequence
  Synthesized
gctcagttgttgtctggtaaggctcaggctcag

SEQ ID NO: 6328 - DNA, 33 bp, Artificial Sequence
  Synthesized
gctcagttgttgtctaagactgattatgctcag

SEQ ID NO: 6329 - DNA, 33 bp, Artificial Sequence
  Synthesized
gctcagttgttgtctacttctaatcgtgctcag

SEQ ID NO: 6330 - DNA, 33 bp, Artificial Sequence
  Synthesized
gctcagttgttgactgctactactgatgctcag

SEQ ID NO: 6331 - DNA, 33 bp, Artificial Sequence
  Synthesized
gctcagttgttgactgataagacttctgctcag

SEQ ID NO: 6332 - DNA, 33 bp, Artificial Sequence
  Synthesized
gctcagttgttgtatggtcagactaatgctcag

SEQ ID NO: 6333 - DNA, 33 bp, Artificial Sequence
  Synthesized
gctcagttgatggatgctgctgataatgctcag

SEQ ID NO: 6334 - DNA, 33 bp, Artificial Sequence
  Synthesized
gctcagttgatgggtcagcgtacttctgctcag

SEQ ID NO: 6335 - DNA, 33 bp, Artificial Sequence
  Synthesized
gctcagttgatgttgcctcgtcctcatgctcag

SEQ ID NO: 6336 - DNA, 33 bp, Artificial Sequence
  Synthesized
gctcagttgatgatgcgttctgttgatgctcag

SEQ ID NO: 6337 - DNA, 33 bp, Artificial Sequence
  Synthesized
gctcagttgatgcaggttaaggatcatgctcag

SEQ ID NO: 6338 - DNA, 33 bp, Artificial Sequence
  Synthesized
gctcagttgatgcgtcctgattctttggctcag

SEQ ID NO: 6339 - DNA, 33 bp, Artificial Sequence
  Synthesized
gctcagttgaatgcttcttcttctattgctcag

SEQ ID NO: 6340 - DNA, 33 bp, Artificial Sequence
  Synthesized
gctcagttgaatgatcgtgctgtttctgctcag

SEQ ID NO: 6341 - DNA, 33 bp, Artificial Sequence
  Synthesized
gctcagttgaatgatactcgtaatcgtgctcag

SEQ ID NO: 6342 - DNA, 33 bp, Artificial Sequence
  Synthesized
gctcagttgaatgagactcgtaatactgctcag

SEQ ID NO: 6343 - DNA, 33 bp, Artificial Sequence
  Synthesized
gctcagttgaatggtcataatatgttggctcag

SEQ ID NO: 6344 - DNA, 33 bp, Artificial Sequence
  Synthesized
gctcagttgaatggtactcgtttgatggctcag

SEQ ID NO: 6345 - DNA, 33 bp, Artificial Sequence
  Synthesized
gctcagttgaatcatgctactcgtggtgctcag

SEQ ID NO: 6346 - DNA, 33 bp, Artificial Sequence
  Synthesized
gctcagttgaatcatactaagcagactgctcag

SEQ ID NO: 6347 - DNA, 33 bp, Artificial Sequence
  Synthesized
gctcagttgaatcatactcgtatgtctgctcag

SEQ ID NO: 6348 - DNA, 33 bp, Artificial Sequence
  Synthesized
gctcagttgaatcatactcgtcctggtgctcag

SEQ ID NO: 6349 - DNA, 33 bp, Artificial Sequence
  Synthesized
gctcagttgaatcatactcgtcgtactgctcag

SEQ ID NO: 6350 - DNA, 33 bp, Artificial Sequence
  Synthesized
gctcagttgaatttgccttttcatcctgctcag

SEQ ID NO: 6351 - DNA, 33 bp, Artificial Sequence
  Synthesized
gctcagttgaatatgactcgtcatcgtgctcag

SEQ ID NO: 6352 - DNA, 33 bp, Artificial Sequence
  Synthesized
gctcagttgaataatcgtttgggtgctgctcag

SEQ ID NO: 6353 - DNA, 33 bp, Artificial Sequence
  Synthesized
gctcagttgaataatactgagttttctgctcag

SEQ ID NO: 6354 - DNA, 33 bp, Artificial Sequence
  Synthesized
gctcagttgaataatactcatactcgtgctcag

SEQ ID NO: 6355 - DNA, 33 bp, Artificial Sequence
  Synthesized
gctcagttgaataatactcctcctcctgctcag

SEQ ID NO: 6356 - DNA, 33 bp, Artificial Sequence
  Synthesized
gctcagttgaataatacttatcatttggctcag

SEQ ID NO: 6357 - DNA, 33 bp, Artificial Sequence
  Synthesized
gctcagttgaatcctgctgatatttctgctcag

SEQ ID NO: 6358 - DNA, 33 bp, Artificial Sequence
  Synthesized
gctcagttgaatcctcgtggtgctaatgctcag

SEQ ID NO: 6359 - DNA, 33 bp, Artificial Sequence
  Synthesized
gctcagttgaatcctcgtaatggttctgctcag

SEQ ID NO: 6360 - DNA, 33 bp, Artificial Sequence
  Synthesized
gctcagttgaatcctactcgtgttgttgctcag

SEQ ID NO: 6361 - DNA, 33 bp, Artificial Sequence
  Synthesized
gctcagttgaatcctactcgttattatgctcag

SEQ ID NO: 6362 - DNA, 33 bp, Artificial Sequence
  Synthesized
gctcagttgaatcctgttgatcgttctgctcag

SEQ ID NO: 6363 - DNA, 33 bp, Artificial Sequence
  Synthesized
gctcagttgaatcctgttggtcgttctgctcag

SEQ ID NO: 6364 - DNA, 33 bp, Artificial Sequence
  Synthesized
gctcagttgaatcctgttcatcgttctgctcag

SEQ ID NO: 6365 - DNA, 33 bp, Artificial Sequence
  Synthesized
gctcagttgaatccttattctgctatggctcag

SEQ ID NO: 6366 - DNA, 33 bp, Artificial Sequence
  Synthesized
gctcagttgaattctggtcctgctaaggctcag

SEQ ID NO: 6367 - DNA, 33 bp, Artificial Sequence
  Synthesized
gctcagttgaattctttggctcgttctgctcag

SEQ ID NO: 6368 - DNA, 33 bp, Artificial Sequence
  Synthesized
gctcagttgaattcttcttctattattgctcag

SEQ ID NO: 6369 - DNA, 33 bp, Artificial Sequence
  Synthesized
gctcagttgaattcttcttctaatcgtgctcag

SEQ ID NO: 6370 - DNA, 33 bp, Artificial Sequence
  Synthesized
gctcagttgaatactactaagcctattgctcag

SEQ ID NO: 6371 - DNA, 33 bp, Artificial Sequence
  Synthesized
gctcagttgaatactgttgctcgttctgctcag

SEQ ID NO: 6372 - DNA, 33 bp, Artificial Sequence
  Synthesized
gctcagttgaatactgttaagggtactgctcag

SEQ ID NO: 6373 - DNA, 33 bp, Artificial Sequence
  Synthesized
gctcagttgaatactgttaagcctttggctcag

SEQ ID NO: 6374 - DNA, 33 bp, Artificial Sequence
  Synthesized
gctcagttgaatgttactactactcgtgctcag

SEQ ID NO: 6375 - DNA, 33 bp, Artificial Sequence
  Synthesized
gctcagttgaattatactcgtcagattgctcag

SEQ ID NO: 6376 - DNA, 33 bp, Artificial Sequence
  Synthesized
gctcagttgcctttgggtggtcgtcaggctcag

SEQ ID NO: 6377 - DNA, 33 bp, Artificial Sequence
  Synthesized
gctcagttgcctttgcctaagaatcgtgctcag

SEQ ID NO: 6378 - DNA, 33 bp, Artificial Sequence
  Synthesized
gctcagttgcctaatttggttttgcatgctcag

SEQ ID NO: 6379 - DNA, 33 bp, Artificial Sequence
  Synthesized
gctcagttgcctaatcgtactcctcctgctcag

SEQ ID NO: 6380 - DNA, 33 bp, Artificial Sequence
  Synthesized
gctcagttgcctaattctggtactttggctcag

SEQ ID NO: 6381 - DNA, 33 bp, Artificial Sequence
  Synthesized
gctcagttgcctcctttttcttttatggctcag

SEQ ID NO: 6382 - DNA, 33 bp, Artificial Sequence
  Synthesized
gctcagttgcctcaggcttctcgtgatgctcag

SEQ ID NO: 6383 - DNA, 33 bp, Artificial Sequence
  Synthesized
gctcagttgcctcagaagtctgcttctgctcag

SEQ ID NO: 6384 - DNA, 33 bp, Artificial Sequence
  Synthesized
gctcagttgcctcagttgtcttttatggctcag

SEQ ID NO: 6385 - DNA, 33 bp, Artificial Sequence
  Synthesized
gctcagttgcctcagaattataaggatgctcag

SEQ ID NO: 6386 - DNA, 33 bp, Artificial Sequence
  Synthesized
gctcagttgcctcagactacttctcgtgctcag

SEQ ID NO: 6387 - DNA, 33 bp, Artificial Sequence
  Synthesized
gctcagttgcctcgtgctacttctactgctcag

SEQ ID NO: 6388 - DNA, 33 bp, Artificial Sequence
  Synthesized
gctcagttgcctcgtggtgatttgcatgctcag

SEQ ID NO: 6389 - DNA, 33 bp, Artificial Sequence
  Synthesized
gctcagttgcctcgtttgtctcaggatgctcag

SEQ ID NO: 6390 - DNA, 33 bp, Artificial Sequence
  Synthesized
gctcagttgcctcgttctcataatgatgctcag

SEQ ID NO: 6391 - DNA, 33 bp, Artificial Sequence
  Synthesized
gctcagttgcctcgtgtttctacttctgctcag

SEQ ID NO: 6392 - DNA, 33 bp, Artificial Sequence
  Synthesized
gctcagttgccttctggtttgttgactgctcag

SEQ ID NO: 6393 - DNA, 33 bp, Artificial Sequence
  Synthesized
gctcagttgccttctttgcgtggtgctgctcag

SEQ ID NO: 6394 - DNA, 33 bp, Artificial Sequence
  Synthesized
gctcagttgccttcttcttctttgcaggctcag

SEQ ID NO: 6395 - DNA, 33 bp, Artificial Sequence
  Synthesized
gctcagttgcctactttgcaggctactgctcag

SEQ ID NO: 6396 - DNA, 33 bp, Artificial Sequence
  Synthesized
gctcagttgcaggaggctaatcgtaaggctcag

SEQ ID NO: 6397 - DNA, 33 bp, Artificial Sequence
  Synthesized
gctcagttgcagaagcctgatcctgctgctcag

SEQ ID NO: 6398 - DNA, 33 bp, Artificial Sequence
  Synthesized
gctcagttgcagttgcctggtttgtctgctcag

SEQ ID NO: 6399 - DNA, 33 bp, Artificial Sequence
  Synthesized
gctcagttgcagcctattcagactcaggctcag

SEQ ID NO: 6400 - DNA, 33 bp, Artificial Sequence
  Synthesized
gctcagttgcagcagccttctttgtatgctcag

SEQ ID NO: 6401 - DNA, 33 bp, Artificial Sequence
  Synthesized
gctcagttgcagcgtattggtgctaatgctcag

SEQ ID NO: 6402 - DNA, 33 bp, Artificial Sequence
  Synthesized
gctcagttgcagcgtaagattgaggatgctcag

SEQ ID NO: 6403 - DNA, 33 bp, Artificial Sequence
  Synthesized
gctcagttgcagcgttctccttctaatgctcag

SEQ ID NO: 6404 - DNA, 33 bp, Artificial Sequence
  Synthesized
gctcagttgcagtctaagtctttggatgctcag

SEQ ID NO: 6405 - DNA, 33 bp, Artificial Sequence
  Synthesized
gctcagttgcagtctatgtcttctcgtgctcag

SEQ ID NO: 6406 - DNA, 33 bp, Artificial Sequence
  Synthesized
gctcagttgcagtctactaagaatgaggctcag

SEQ ID NO: 6407 - DNA, 33 bp, Artificial Sequence
  Synthesized
gctcagttgcagactaatcgtgttactgctcag

SEQ ID NO: 6408 - DNA, 33 bp, Artificial Sequence
  Synthesized
gctcagttgcagactaattctcatcctgctcag

SEQ ID NO: 6409 - DNA, 33 bp, Artificial Sequence
  Synthesized
gctcagttgcagactcgtgatactaatgctcag

SEQ ID NO: 6410 - DNA, 33 bp, Artificial Sequence
  Synthesized
gctcagttgcagacttctcagattaaggctcag

SEQ ID NO: 6411 - DNA, 33 bp, Artificial Sequence
  Synthesized
gctcagttgcaggttgctaagactcaggctcag

SEQ ID NO: 6412 - DNA, 33 bp, Artificial Sequence
  Synthesized
gctcagttgcaggttcatactgttgttgctcag

SEQ ID NO: 6413 - DNA, 33 bp, Artificial Sequence
  Synthesized
gctcagttgcagtatggttctcagaaggctcag

SEQ ID NO: 6414 - DNA, 33 bp, Artificial Sequence
  Synthesized
gctcagttgcagtatcgttctcagtctgctcag

SEQ ID NO: 6415 - DNA, 33 bp, Artificial Sequence
  Synthesized
gctcagttgcgtgcttctttgggtggtgctcag

SEQ ID NO: 6416 - DNA, 33 bp, Artificial Sequence
  Synthesized
gctcagttgcgtgcttctactgttactgctcag

SEQ ID NO: 6417 - DNA, 33 bp, Artificial Sequence
  Synthesized
gctcagttgcgtgatatgaatcatttggctcag

SEQ ID NO: 6418 - DNA, 33 bp, Artificial Sequence
  Synthesized
gctcagttgcgtgattctgctaaggttgctcag

SEQ ID NO: 6419 - DNA, 33 bp, Artificial Sequence
  Synthesized
gctcagttgcgtgagggtcgtttgactgctcag

SEQ ID NO: 6420 - DNA, 33 bp, Artificial Sequence
  Synthesized
gctcagttgcgtgagttgaagggttctgctcag

SEQ ID NO: 6421 - DNA, 33 bp, Artificial Sequence
  Synthesized
gctcagttgcgtggtactaatcctgttgctcag

SEQ ID NO: 6422 - DNA, 33 bp, Artificial Sequence
  Synthesized
gctcagttgcgtcatggtcctgagaatgctcag

SEQ ID NO: 6423 - DNA, 33 bp, Artificial Sequence
  Synthesized
gctcagttgcgtcattctatgaatgatgctcag

SEQ ID NO: 6424 - DNA, 33 bp, Artificial Sequence
  Synthesized
gctcagttgcgtttgcctcgtaagaatgctcag

SEQ ID NO: 6425 - DNA, 33 bp, Artificial Sequence
  Synthesized
gctcagttgcgtttgcctcgtatggctgctcag

SEQ ID NO: 6426 - DNA, 33 bp, Artificial Sequence
  Synthesized
gctcagttgcgtttgcaggttaaggatgctcag

SEQ ID NO: 6427 - DNA, 33 bp, Artificial Sequence
  Synthesized
gctcagttgcgtaatgttactgctggtgctcag

SEQ ID NO: 6428 - DNA, 33 bp, Artificial Sequence
  Synthesized
gctcagttgcgtcctgctttgactgaggctcag

SEQ ID NO: 6429 - DNA, 33 bp, Artificial Sequence
  Synthesized
gctcagttgcgtccttctgctatgggtgctcag

SEQ ID NO: 6430 - DNA, 33 bp, Artificial Sequence
  Synthesized
gctcagttgcgtcctgtttctgctactgctcag

SEQ ID NO: 6431 - DNA, 33 bp, Artificial Sequence
  Synthesized
gctcagttgcgtcagggtaataaggatgctcag

SEQ ID NO: 6432 - DNA, 33 bp, Artificial Sequence
  Synthesized
gctcagttgcgtcagaagcaggatgctgctcag

SEQ ID NO: 6433 - DNA, 33 bp, Artificial Sequence
  Synthesized
gctcagttgcgttctgctacttctttggctcag

SEQ ID NO: 6434 - DNA, 33 bp, Artificial Sequence
  Synthesized
gctcagttgcgttctgatcgtatgactgctcag

SEQ ID NO: 6435 - DNA, 33 bp, Artificial Sequence
  Synthesized
gctcagttgcgttctggtaatttggctgctcag

SEQ ID NO: 6436 - DNA, 33 bp, Artificial Sequence
  Synthesized
gctcagttgcgttctcatgatactactgctcag

SEQ ID NO: 6437 - DNA, 33 bp, Artificial Sequence
  Synthesized
gctcagttgcgtactaatgatcataaggctcag

SEQ ID NO: 6438 - DNA, 33 bp, Artificial Sequence
  Synthesized
gctcagttgcgtactaatactggttctgctcag

SEQ ID NO: 6439 - DNA, 33 bp, Artificial Sequence
  Synthesized
gctcagttgcgtactcctcctaatcctgctcag

SEQ ID NO: 6440 - DNA, 33 bp, Artificial Sequence
  Synthesized
gctcagttgcgtactacttctggttctgctcag

SEQ ID NO: 6441 - DNA, 33 bp, Artificial Sequence
  Synthesized
gctcagttgcgtgtttctgagaagggtgctcag

SEQ ID NO: 6442 - DNA, 33 bp, Artificial Sequence
  Synthesized
gctcagttgcgtgtttctaatgctcctgctcag

SEQ ID NO: 6443 - DNA, 33 bp, Artificial Sequence
  Synthesized
gctcagttgcgttatccttcttttatggctcag

SEQ ID NO: 6444 - DNA, 33 bp, Artificial Sequence
  Synthesized
gctcagttgtctgctggtgttcaggctgctcag

SEQ ID NO: 6445 - DNA, 33 bp, Artificial Sequence
  Synthesized
gctcagttgtctgctaaggctatgcatgctcag

SEQ ID NO: 6446 - DNA, 33 bp, Artificial Sequence
  Synthesized
gctcagttgtctgctaatgctaagactgctcag

SEQ ID NO: 6447 - DNA, 33 bp, Artificial Sequence
  Synthesized
gctcagttgtctgcttctaattcttctgctcag

SEQ ID NO: 6448 - DNA, 33 bp, Artificial Sequence
  Synthesized
gctcagttgtctgcttcttctactcgtgctcag

SEQ ID NO: 6449 - DNA, 33 bp, Artificial Sequence
  Synthesized
gctcagttgtctgagcctactcagaatgctcag

SEQ ID NO: 6450 - DNA, 33 bp, Artificial Sequence
  Synthesized
gctcagttgtctggttctttgactcgtgctcag

SEQ ID NO: 6451 - DNA, 33 bp, Artificial Sequence
  Synthesized
gctcagttgtctggttctcgtgataaggctcag

SEQ ID NO: 6452 - DNA, 33 bp, Artificial Sequence
  Synthesized
gctcagttgtctggttcttctcgtggtgctcag

SEQ ID NO: 6453 - DNA, 33 bp, Artificial Sequence
  Synthesized
gctcagttgtctcattcttctttggttgctcag

SEQ ID NO: 6454 - DNA, 33 bp, Artificial Sequence
  Synthesized
gctcagttgtctcattattctgctgaggctcag

SEQ ID NO: 6455 - DNA, 33 bp, Artificial Sequence
  Synthesized
gctcagttgtctaagtttgttattcctgctcag

SEQ ID NO: 6456 - DNA, 33 bp, Artificial Sequence
  Synthesized
gctcagttgtctaagattttgccttctgctcag

SEQ ID NO: 6457 - DNA, 33 bp, Artificial Sequence
  Synthesized
gctcagttgtctaaggttggtcagattgctcag

SEQ ID NO: 6458 - DNA, 33 bp, Artificial Sequence
  Synthesized
gctcagttgtctttggatcgtactactgctcag

SEQ ID NO: 6459 - DNA, 33 bp, Artificial Sequence
  Synthesized
gctcagttgtctttgaagaattcttctgctcag

SEQ ID NO: 6460 - DNA, 33 bp, Artificial Sequence
  Synthesized
gctcagttgtctttgaagtctatgcaggctcag

SEQ ID NO: 6461 - DNA, 33 bp, Artificial Sequence
  Synthesized
gctcagttgtctttgtctcaggctcctgctcag

SEQ ID NO: 6462 - DNA, 33 bp, Artificial Sequence
  Synthesized
gctcagttgtctaatcatggtgttattgctcag

SEQ ID NO: 6463 - DNA, 33 bp, Artificial Sequence
  Synthesized
gctcagttgtctaatatttctttgaaggctcag

SEQ ID NO: 6464 - DNA, 33 bp, Artificial Sequence
  Synthesized
gctcagttgtctaatttgttgcgttctgctcag

SEQ ID NO: 6465 - DNA, 33 bp, Artificial Sequence
  Synthesized
gctcagttgtctaatcagaaggttattgctcag

SEQ ID NO: 6466 - DNA, 33 bp, Artificial Sequence
  Synthesized
gctcagttgtctaatcagttgaagtctgctcag

SEQ ID NO: 6467 - DNA, 33 bp, Artificial Sequence
  Synthesized
gctcagttgtctaatactgctatgaatgctcag

SEQ ID NO: 6468 - DNA, 33 bp, Artificial Sequence
  Synthesized
gctcagttgtctaatgttaatcagaaggctcag

SEQ ID NO: 6469 - DNA, 33 bp, Artificial Sequence
  Synthesized
gctcagttgtctaatgtttctcctaaggctcag

SEQ ID NO: 6470 - DNA, 33 bp, Artificial Sequence
  Synthesized
gctcagttgtctcctcattatgctcgtgctcag

SEQ ID NO: 6471 - DNA, 33 bp, Artificial Sequence
  Synthesized
gctcagttgtctcctcgtaatcctttggctcag

SEQ ID NO: 6472 - DNA, 33 bp, Artificial Sequence
  Synthesized
gctcagttgtctcctactcaggttcgtgctcag

SEQ ID NO: 6473 - DNA, 33 bp, Artificial Sequence
  Synthesized
gctcagttgtctcaggctggtaagatggctcag

SEQ ID NO: 6474 - DNA, 33 bp, Artificial Sequence
  Synthesized
gctcagttgtctcagcgtaaggaggttgctcag

SEQ ID NO: 6475 - DNA, 33 bp, Artificial Sequence
  Synthesized
gctcagttgtctcagcgtttgtctgctgctcag

SEQ ID NO: 6476 - DNA, 33 bp, Artificial Sequence
  Synthesized
gctcagttgtctcagactgattctactgctcag

SEQ ID NO: 6477 - DNA, 33 bp, Artificial Sequence
  Synthesized
gctcagttgtctcgtaatactcagcctgctcag

SEQ ID NO: 6478 - DNA, 33 bp, Artificial Sequence
  Synthesized
gctcagttgtctcgtcctaatcctcctgctcag

SEQ ID NO: 6479 - DNA, 33 bp, Artificial Sequence
  Synthesized
gctcagttgtctcgttctgattctttggctcag

SEQ ID NO: 6480 - DNA, 33 bp, Artificial Sequence
  Synthesized
gctcagttgtctcgttctccttctactgctcag

SEQ ID NO: 6481 - DNA, 33 bp, Artificial Sequence
  Synthesized
gctcagttgtctcgtacttctgctgctgctcag

SEQ ID NO: 6482 - DNA, 33 bp, Artificial Sequence
  Synthesized
gctcagttgtctcgtactgttactggtgctcag

SEQ ID NO: 6483 - DNA, 33 bp, Artificial Sequence
  Synthesized
gctcagttgtctcgtgtttctatttctgctcag

SEQ ID NO: 6484 - DNA, 33 bp, Artificial Sequence
  Synthesized
gctcagttgtcttctgctcgttatgctgctcag

SEQ ID NO: 6485 - DNA, 33 bp, Artificial Sequence
  Synthesized
gctcagttgtcttctgagcgtttgcgtgctcag

SEQ ID NO: 6486 - DNA, 33 bp, Artificial Sequence
  Synthesized
gctcagttgtcttctattgctaatcaggctcag

SEQ ID NO: 6487 - DNA, 33 bp, Artificial Sequence
  Synthesized
gctcagttgtcttctttggatcagactgctcag

SEQ ID NO: 6488 - DNA, 33 bp, Artificial Sequence
  Synthesized
gctcagttgtcttctaatgctcgtactgctcag

SEQ ID NO: 6489 - DNA, 33 bp, Artificial Sequence
  Synthesized
gctcagttgtcttctcgtactgttggtgctcag

SEQ ID NO: 6490 - DNA, 33 bp, Artificial Sequence
  Synthesized
gctcagttgtcttcttctttgaagtctgctcag

SEQ ID NO: 6491 - DNA, 33 bp, Artificial Sequence
  Synthesized
gctcagttgtcttcttctcctcgtactgctcag

SEQ ID NO: 6492 - DNA, 33 bp, Artificial Sequence
  Synthesized
gctcagttgtcttcttctcgttatcctgctcag

SEQ ID NO: 6493 - DNA, 33 bp, Artificial Sequence
  Synthesized
gctcagttgtcttctacttcttctattgctcag

SEQ ID NO: 6494 - DNA, 33 bp, Artificial Sequence
  Synthesized
gctcagttgtcttctgttgcttctttggctcag

SEQ ID NO: 6495 - DNA, 33 bp, Artificial Sequence
  Synthesized
gctcagttgtctactgctggtaagaatgctcag

SEQ ID NO: 6496 - DNA, 33 bp, Artificial Sequence
  Synthesized
gctcagttgtctactcatacttctaatgctcag

SEQ ID NO: 6497 - DNA, 33 bp, Artificial Sequence
  Synthesized
gctcagttgtctactaagtctaattctgctcag

SEQ ID NO: 6498 - DNA, 33 bp, Artificial Sequence
  Synthesized
gctcagttgtctactaatgttcatcctgctcag

SEQ ID NO: 6499 - DNA, 33 bp, Artificial Sequence
  Synthesized
gctcagttgtctactactgctttgtctgctcag

SEQ ID NO: 6500 - DNA, 33 bp, Artificial Sequence
  Synthesized
gctcagttgtctactgtttctcgttctgctcag

SEQ ID NO: 6501 - DNA, 33 bp, Artificial Sequence
  Synthesized
gctcagttgactgctgctaaggatcgtgctcag

SEQ ID NO: 6502 - DNA, 33 bp, Artificial Sequence
  Synthesized
gctcagttgactggtcagcgtacttctgctcag

SEQ ID NO: 6503 - DNA, 33 bp, Artificial Sequence
  Synthesized
gctcagttgactggtcgtacttcttctgctcag

SEQ ID NO: 6504 - DNA, 33 bp, Artificial Sequence
  Synthesized
gctcagttgactggttctcatttgcgtgctcag

SEQ ID NO: 6505 - DNA, 33 bp, Artificial Sequence
  Synthesized
gctcagttgactggtactttggctggtgctcag

SEQ ID NO: 6506 - DNA, 33 bp, Artificial Sequence
  Synthesized
gctcagttgactattcgttctcaggttgctcag

SEQ ID NO: 6507 - DNA, 33 bp, Artificial Sequence
  Synthesized
gctcagttgactatttctcctgtttctgctcag

SEQ ID NO: 6508 - DNA, 33 bp, Artificial Sequence
  Synthesized
gctcagttgactaagaatatgaataatgctcag

SEQ ID NO: 6509 - DNA, 33 bp, Artificial Sequence
  Synthesized
gctcagttgactaagactgtttctaatgctcag

SEQ ID NO: 6510 - DNA, 33 bp, Artificial Sequence
  Synthesized
gctcagttgactaatgctggtggtatggctcag

SEQ ID NO: 6511 - DNA, 33 bp, Artificial Sequence
  Synthesized
gctcagttgactaatacttctcgtgctgctcag

SEQ ID NO: 6512 - DNA, 33 bp, Artificial Sequence
  Synthesized
gctcagttgactcctcatattactgaggctcag

SEQ ID NO: 6513 - DNA, 33 bp, Artificial Sequence
  Synthesized
gctcagttgactcaggctgatcctactgctcag

SEQ ID NO: 6514 - DNA, 33 bp, Artificial Sequence
  Synthesized
gctcagttgactcgtgatcagttgcctgctcag

SEQ ID NO: 6515 - DNA, 33 bp, Artificial Sequence
  Synthesized
gctcagttgactcgtggtccttctgctgctcag

SEQ ID NO: 6516 - DNA, 33 bp, Artificial Sequence
  Synthesized
gctcagttgactcgtgtttctattcatgctcag

SEQ ID NO: 6517 - DNA, 33 bp, Artificial Sequence
  Synthesized
gctcagttgacttctggtgtttctaaggctcag

SEQ ID NO: 6518 - DNA, 33 bp, Artificial Sequence
  Synthesized
gctcagttgacttctatgaaggataaggctcag

SEQ ID NO: 6519 - DNA, 33 bp, Artificial Sequence
  Synthesized
gctcagttgacttctatgaattctactgctcag

SEQ ID NO: 6520 - DNA, 33 bp, Artificial Sequence
  Synthesized
gctcagttgacttctcgtgctcctcaggctcag

SEQ ID NO: 6521 - DNA, 33 bp, Artificial Sequence
  Synthesized
gctcagttgacttctcgtactactcatgctcag

SEQ ID NO: 6522 - DNA, 33 bp, Artificial Sequence
  Synthesized
gctcagttgacttcttctgttaagactgctcag

SEQ ID NO: 6523 - DNA, 33 bp, Artificial Sequence
  Synthesized
gctcagttgacttctgttgctttgcgtgctcag

SEQ ID NO: 6524 - DNA, 33 bp, Artificial Sequence
  Synthesized
gctcagttgactactggtttgtctatggctcag

SEQ ID NO: 6525 - DNA, 33 bp, Artificial Sequence
  Synthesized
gctcagttgactacttcttctactttggctcag

SEQ ID NO: 6526 - DNA, 33 bp, Artificial Sequence
  Synthesized
gctcagttgactactactttgggtattgctcag

SEQ ID NO: 6527 - DNA, 33 bp, Artificial Sequence
  Synthesized
gctcagttgactgttggtcagcctcgtgctcag

SEQ ID NO: 6528 - DNA, 33 bp, Artificial Sequence
  Synthesized
gctcagttgactgttcataatattactgctcag

SEQ ID NO: 6529 - DNA, 33 bp, Artificial Sequence
  Synthesized
gctcagttgactgttaatcctcgttctgctcag

SEQ ID NO: 6530 - DNA, 33 bp, Artificial Sequence
  Synthesized
gctcagttggttgctgattctaagtgggctcag

SEQ ID NO: 6531 - DNA, 33 bp, Artificial Sequence
  Synthesized
gctcagttggttgagggtcgtcctaaggctcag

SEQ ID NO: 6532 - DNA, 33 bp, Artificial Sequence
  Synthesized
gctcagttggttggtgctcgtgaggttgctcag

SEQ ID NO: 6533 - DNA, 33 bp, Artificial Sequence
  Synthesized
gctcagttggttggtaagactgtttctgctcag

SEQ ID NO: 6534 - DNA, 33 bp, Artificial Sequence
  Synthesized
gctcagttggttggtcagtctatgaaggctcag

SEQ ID NO: 6535 - DNA, 33 bp, Artificial Sequence
  Synthesized
gctcagttggttaagcctactaatgctgctcag

SEQ ID NO: 6536 - DNA, 33 bp, Artificial Sequence
  Synthesized
gctcagttggttaagtctactggtgctgctcag

SEQ ID NO: 6537 - DNA, 33 bp, Artificial Sequence
  Synthesized
gctcagttggttttgcctcgtggtaatgctcag

SEQ ID NO: 6538 - DNA, 33 bp, Artificial Sequence
  Synthesized
gctcagttggttttgcctcgtcctaaggctcag

SEQ ID NO: 6539 - DNA, 33 bp, Artificial Sequence
  Synthesized
gctcagttggttaatcatgctaagtctgctcag

SEQ ID NO: 6540 - DNA, 33 bp, Artificial Sequence
  Synthesized
gctcagttggttaatcatcatactgttgctcag

SEQ ID NO: 6541 - DNA, 33 bp, Artificial Sequence
  Synthesized
gctcagttggttcctggtggtattactgctcag

SEQ ID NO: 6542 - DNA, 33 bp, Artificial Sequence
  Synthesized
gctcagttggttcctactattacttctgctcag

SEQ ID NO: 6543 - DNA, 33 bp, Artificial Sequence
  Synthesized
gctcagttggttcgtcagcagaatactgctcag

SEQ ID NO: 6544 - DNA, 33 bp, Artificial Sequence
  Synthesized
gctcagttggttcgtactactactggtgctcag

SEQ ID NO: 6545 - DNA, 33 bp, Artificial Sequence
  Synthesized
gctcagttggtttctgatcctcagaaggctcag

SEQ ID NO: 6546 - DNA, 33 bp, Artificial Sequence
  Synthesized
gctcagttggtttctaagatggatactgctcag

SEQ ID NO: 6547 - DNA, 33 bp, Artificial Sequence
  Synthesized
gctcagttggtttcttattctactaatgctcag

SEQ ID NO: 6548 - DNA, 33 bp, Artificial Sequence
  Synthesized
gctcagttggttactgctggtactgctgctcag

SEQ ID NO: 6549 - DNA, 33 bp, Artificial Sequence
  Synthesized
gctcagttgtatgatcgttcttctatggctcag

SEQ ID NO: 6550 - DNA, 33 bp, Artificial Sequence
  Synthesized
gctcagttgtatggtaagtctaatactgctcag

SEQ ID NO: 6551 - DNA, 33 bp, Artificial Sequence
  Synthesized
gctcagttgtatggtttggatgctaaggctcag

SEQ ID NO: 6552 - DNA, 33 bp, Artificial Sequence
  Synthesized
gctcagttgtataagcagcagtatgatgctcag

SEQ ID NO: 6553 - DNA, 33 bp, Artificial Sequence
  Synthesized
gctcagttgtatttgcctcgtgctaaggctcag

SEQ ID NO: 6554 - DNA, 33 bp, Artificial Sequence
  Synthesized
gctcagttgtatatgaattcttttatggctcag

SEQ ID NO: 6555 - DNA, 33 bp, Artificial Sequence
  Synthesized
gctcagttgtatcctcagttgcagtctgctcag

SEQ ID NO: 6556 - DNA, 33 bp, Artificial Sequence
  Synthesized
gctcagttgtatccttcttctttggctgctcag

SEQ ID NO: 6557 - DNA, 33 bp, Artificial Sequence
  Synthesized
gctcagttgtattcttctactaatcgtgctcag

SEQ ID NO: 6558 - DNA, 33 bp, Artificial Sequence
  Synthesized
gctcagttgtatactactaagatttctgctcag

SEQ ID NO: 6559 - DNA, 33 bp, Artificial Sequence
  Synthesized
gctcagatggctgctgattcttttatggctcag

SEQ ID NO: 6560 - DNA, 33 bp, Artificial Sequence
  Synthesized
gctcagatggctgcttctgctactcgtgctcag

SEQ ID NO: 6561 - DNA, 33 bp, Artificial Sequence
  Synthesized
gctcagatggctttgcctggtcctcatgctcag

SEQ ID NO: 6562 - DNA, 33 bp, Artificial Sequence
  Synthesized
gctcagatggctttgactaatcagcgtgctcag

SEQ ID NO: 6563 - DNA, 33 bp, Artificial Sequence
  Synthesized
gctcagatggctaataagcataattctgctcag

SEQ ID NO: 6564 - DNA, 33 bp, Artificial Sequence
  Synthesized
gctcagatggctcctcgtgagtctgttgctcag

SEQ ID NO: 6565 - DNA, 33 bp, Artificial Sequence
  Synthesized
gctcagatggctcgtcatttggatcctgctcag

SEQ ID NO: 6566 - DNA, 33 bp, Artificial Sequence
  Synthesized
gctcagatggcttctaattctttgaaggctcag

SEQ ID NO: 6567 - DNA, 33 bp, Artificial Sequence
  Synthesized
gctcagatggctactaagtatgcttctgctcag

SEQ ID NO: 6568 - DNA, 33 bp, Artificial Sequence
  Synthesized
gctcagatggctgttaagcatactcaggctcag

SEQ ID NO: 6569 - DNA, 33 bp, Artificial Sequence
  Synthesized
gctcagatggatgataagaagaagtgggctcag

SEQ ID NO: 6570 - DNA, 33 bp, Artificial Sequence
  Synthesized
gctcagatggatcgtgttaatcatgctgctcag

SEQ ID NO: 6571 - DNA, 33 bp, Artificial Sequence
  Synthesized
gctcagatggattctaagggtcgtcctgctcag

SEQ ID NO: 6572 - DNA, 33 bp, Artificial Sequence
  Synthesized
gctcagatggattctaagatgcgtgctgctcag

SEQ ID NO: 6573 - DNA, 33 bp, Artificial Sequence
  Synthesized
gctcagatggatgttggtaatcgtaaggctcag

SEQ ID NO: 6574 - DNA, 33 bp, Artificial Sequence
  Synthesized
gctcagatggagaagcgtatgtattctgctcag

SEQ ID NO: 6575 - DNA, 33 bp, Artificial Sequence
  Synthesized
gctcagatgtttttgcctggtggtactgctcag

SEQ ID NO: 6576 - DNA, 33 bp, Artificial Sequence
  Synthesized
gctcagatgtttttgcctcgtttttttgctcag

SEQ ID NO: 6577 - DNA, 33 bp, Artificial Sequence
  Synthesized
gctcagatgtttcctggttcttctcctgctcag

SEQ ID NO: 6578 - DNA, 33 bp, Artificial Sequence
  Synthesized
gctcagatgggtattaatattaatactgctcag

SEQ ID NO: 6579 - DNA, 33 bp, Artificial Sequence
  Synthesized
gctcagatgggtttgcctaaggagcatgctcag

SEQ ID NO: 6580 - DNA, 33 bp, Artificial Sequence
  Synthesized
gctcagatgggtttgcctaatggtattgctcag

SEQ ID NO: 6581 - DNA, 33 bp, Artificial Sequence
  Synthesized
gctcagatgggtaatcagaaggttattgctcag

SEQ ID NO: 6582 - DNA, 33 bp, Artificial Sequence
  Synthesized
gctcagatgggtcctccttctgctatggctcag

SEQ ID NO: 6583 - DNA, 33 bp, Artificial Sequence
  Synthesized
gctcagatgggtgtttctggtggtgttgctcag

SEQ ID NO: 6584 - DNA, 33 bp, Artificial Sequence
  Synthesized
gctcagatgcatggtccttcttttatggctcag

SEQ ID NO: 6585 - DNA, 33 bp, Artificial Sequence
  Synthesized
gctcagatgcataagcattcttttatggctcag

SEQ ID NO: 6586 - DNA, 33 bp, Artificial Sequence
  Synthesized
gctcagatgcatttgttttcttttatggctcag

SEQ ID NO: 6587 - DNA, 33 bp, Artificial Sequence
  Synthesized
gctcagatgcatttgcctgctaatcctgctcag

SEQ ID NO: 6588 - DNA, 33 bp, Artificial Sequence
  Synthesized
gctcagatgcatttgcctcgtttgatggctcag

SEQ ID NO: 6589 - DNA, 33 bp, Artificial Sequence
  Synthesized
gctcagatgcataatcattctgctatggctcag

SEQ ID NO: 6590 - DNA, 33 bp, Artificial Sequence
  Synthesized
gctcagatgattaagtctaatactcctgctcag

SEQ ID NO: 6591 - DNA, 33 bp, Artificial Sequence
  Synthesized
gctcagatgattttgcctcgtatgcctgctcag

SEQ ID NO: 6592 - DNA, 33 bp, Artificial Sequence
  Synthesized
gctcagatgatttctgctaagtctgatgctcag

SEQ ID NO: 6593 - DNA, 33 bp, Artificial Sequence
  Synthesized
gctcagatgatttctgctaattctgatgctcag

SEQ ID NO: 6594 - DNA, 33 bp, Artificial Sequence
  Synthesized
gctcagatgatttctgctaattcttatgctcag

SEQ ID NO: 6595 - DNA, 33 bp, Artificial Sequence
  Synthesized
gctcagatgatttctgctaatactgatgctcag

SEQ ID NO: 6596 - DNA, 33 bp, Artificial Sequence
  Synthesized
gctcagatgaaggctaatactggtttggctcag

SEQ ID NO: 6597 - DNA, 33 bp, Artificial Sequence
  Synthesized
gctcagatgaagttgcctcatttttatgctcag

SEQ ID NO: 6598 - DNA, 33 bp, Artificial Sequence
  Synthesized
gctcagatgaagaatgattctgaggttgctcag

SEQ ID NO: 6599 - DNA, 33 bp, Artificial Sequence
  Synthesized
gctcagatgaagaatggtcatattgttgctcag

SEQ ID NO: 6600 - DNA, 33 bp, Artificial Sequence
  Synthesized
gctcagatgaagtctgagcctcgtactgctcag

SEQ ID NO: 6601 - DNA, 33 bp, Artificial Sequence
  Synthesized
gctcagatgaagactgctactgatattgctcag

SEQ ID NO: 6602 - DNA, 33 bp, Artificial Sequence
  Synthesized
gctcagatgaagtatcattcttttatggctcag

SEQ ID NO: 6603 - DNA, 33 bp, Artificial Sequence
  Synthesized
gctcagatgttggctaagatgtctgttgctcag

SEQ ID NO: 6604 - DNA, 33 bp, Artificial Sequence
  Synthesized
gctcagatgttggatcgtgctcgttctgctcag

SEQ ID NO: 6605 - DNA, 33 bp, Artificial Sequence
  Synthesized
gctcagatgttggatcgttctttgtctgctcag

SEQ ID NO: 6606 - DNA, 33 bp, Artificial Sequence
  Synthesized
gctcagatgttgggtttgcatgatcaggctcag

SEQ ID NO: 6607 - DNA, 33 bp, Artificial Sequence
  Synthesized
gctcagatgttgaagggtcaggttggtgctcag

SEQ ID NO: 6608 - DNA, 33 bp, Artificial Sequence
  Synthesized
gctcagatgttgaagccttctcatcaggctcag

SEQ ID NO: 6609 - DNA, 33 bp, Artificial Sequence
  Synthesized
gctcagatgttgaatgcttctattcctgctcag

SEQ ID NO: 6610 - DNA, 33 bp, Artificial Sequence
  Synthesized
gctcagatgttgcctgatgctgctcgtgctcag

SEQ ID NO: 6611 - DNA, 33 bp, Artificial Sequence
  Synthesized
gctcagatgttgcagtctggtcgtcctgctcag

SEQ ID NO: 6612 - DNA, 33 bp, Artificial Sequence
  Synthesized
gctcagatgttgcgtactgattctaatgctcag

SEQ ID NO: 6613 - DNA, 33 bp, Artificial Sequence
  Synthesized
gctcagatgttgtctgctgctgagcgtgctcag

SEQ ID NO: 6614 - DNA, 33 bp, Artificial Sequence
  Synthesized
gctcagatgttgtctgagcgtggtactgctcag

SEQ ID NO: 6615 - DNA, 33 bp, Artificial Sequence
  Synthesized
gctcagatgttgtctaaggctgcttctgctcag

SEQ ID NO: 6616 - DNA, 33 bp, Artificial Sequence
  Synthesized
gctcagatgttgtctttgtctgataaggctcag

SEQ ID NO: 6617 - DNA, 33 bp, Artificial Sequence
  Synthesized
gctcagatgttgactggtattactaatgctcag

SEQ ID NO: 6618 - DNA, 33 bp, Artificial Sequence
  Synthesized
gctcagatgttgactggtattactactgctcag

SEQ ID NO: 6619 - DNA, 33 bp, Artificial Sequence
  Synthesized
gctcagatgttgactggtaatactactgctcag

SEQ ID NO: 6620 - DNA, 33 bp, Artificial Sequence
  Synthesized
gctcagatgatggctgttggtgctttggctcag

SEQ ID NO: 6621 - DNA, 33 bp, Artificial Sequence
  Synthesized
gctcagatgatggaggattcttttatggctcag

SEQ ID NO: 6622 - DNA, 33 bp, Artificial Sequence
  Synthesized
gctcagatgatggagactatgggtgttgctcag

SEQ ID NO: 6623 - DNA, 33 bp, Artificial Sequence
  Synthesized
gctcagatgatgattcaggttcgtgaggctcag

SEQ ID NO: 6624 - DNA, 33 bp, Artificial Sequence
  Synthesized
gctcagatgatgtctaagtctgctatggctcag

SEQ ID NO: 6625 - DNA, 33 bp, Artificial Sequence
  Synthesized
gctcagatgatgactaatactaagtctgctcag

SEQ ID NO: 6626 - DNA, 33 bp, Artificial Sequence
  Synthesized
gctcagatgaatggtattcgttatgctgctcag

SEQ ID NO: 6627 - DNA, 33 bp, Artificial Sequence
  Synthesized
gctcagatgaatggtactcgtcgtcatgctcag

SEQ ID NO: 6628 - DNA, 33 bp, Artificial Sequence
  Synthesized
gctcagatgaataagactcgttatactgctcag

SEQ ID NO: 6629 - DNA, 33 bp, Artificial Sequence
  Synthesized
gctcagatgaatttgactcgtcgttatgctcag

SEQ ID NO: 6630 - DNA, 33 bp, Artificial Sequence
  Synthesized
gctcagatgaataatgcttttcatatggctcag

SEQ ID NO: 6631 - DNA, 33 bp, Artificial Sequence
  Synthesized
gctcagatgaataatgctggtcatggtgctcag

SEQ ID NO: 6632 - DNA, 33 bp, Artificial Sequence
  Synthesized
gctcagatgaataatgctcatcgtcctgctcag

SEQ ID NO: 6633 - DNA, 33 bp, Artificial Sequence
  Synthesized
gctcagatgaataatgctttgggttatgctcag

SEQ ID NO: 6634 - DNA, 33 bp, Artificial Sequence
  Synthesized
gctcagatgaataatgctatgcatcatgctcag

SEQ ID NO: 6635 - DNA, 33 bp, Artificial Sequence
  Synthesized
gctcagatgaataatgctatgattactgctcag

SEQ ID NO: 6636 - DNA, 33 bp, Artificial Sequence
  Synthesized
gctcagatgaataatgctcctgattatgctcag

SEQ ID NO: 6637 - DNA, 33 bp, Artificial Sequence
  Synthesized
gctcagatgaataatgctcctcctatggctcag

SEQ ID NO: 6638 - DNA, 33 bp, Artificial Sequence
  Synthesized
gctcagatgaataatgctcgtcctcatgctcag

SEQ ID NO: 6639 - DNA, 33 bp, Artificial Sequence
  Synthesized
gctcagatgaataatgcttattttcaggctcag

SEQ ID NO: 6640 - DNA, 33 bp, Artificial Sequence
  Synthesized
gctcagatgaataatgattttatgggtgctcag

SEQ ID NO: 6641 - DNA, 33 bp, Artificial Sequence
  Synthesized
gctcagatgaataatgataattatgatgctcag

SEQ ID NO: 6642 - DNA, 33 bp, Artificial Sequence
  Synthesized
gctcagatgaataatgattctggtatggctcag

SEQ ID NO: 6643 - DNA, 33 bp, Artificial Sequence
  Synthesized
gctcagatgaataatgattatacttatgctcag

SEQ ID NO: 6644 - DNA, 33 bp, Artificial Sequence
  Synthesized
gctcagatgaataatgaggagatttttgctcag

SEQ ID NO: 6645 - DNA, 33 bp, Artificial Sequence
  Synthesized
gctcagatgaataatgagttttttgttgctcag

SEQ ID NO: 6646 - DNA, 33 bp, Artificial Sequence
  Synthesized
gctcagatgaataatgagatgcctcaggctcag

SEQ ID NO: 6647 - DNA, 33 bp, Artificial Sequence
  Synthesized
gctcagatgaataatgagcgtgataatgctcag

SEQ ID NO: 6648 - DNA, 33 bp, Artificial Sequence
  Synthesized
gctcagatgaataattttcatcatcgtgctcag

SEQ ID NO: 6649 - DNA, 33 bp, Artificial Sequence
  Synthesized
gctcagatgaataattttcatcctcatgctcag

SEQ ID NO: 6650 - DNA, 33 bp, Artificial Sequence
  Synthesized
gctcagatgaataattttcatcctattgctcag

SEQ ID NO: 6651 - DNA, 33 bp, Artificial Sequence
  Synthesized
gctcagatgaataattttcatcgtcctgctcag

SEQ ID NO: 6652 - DNA, 33 bp, Artificial Sequence
  Synthesized
gctcagatgaataattttaagcctcctgctcag

SEQ ID NO: 6653 - DNA, 33 bp, Artificial Sequence
  Synthesized
gctcagatgaataattttttgaatgttgctcag

SEQ ID NO: 6654 - DNA, 33 bp, Artificial Sequence
  Synthesized
gctcagatgaataattttttgcctcctgctcag

SEQ ID NO: 6655 - DNA, 33 bp, Artificial Sequence
  Synthesized
gctcagatgaataattttcctcatggtgctcag

SEQ ID NO: 6656 - DNA, 33 bp, Artificial Sequence
  Synthesized
gctcagatgaataattttcctcctcaggctcag

SEQ ID NO: 6657 - DNA, 33 bp, Artificial Sequence
  Synthesized
gctcagatgaataattttcctcagtatgctcag

SEQ ID NO: 6658 - DNA, 33 bp, Artificial Sequence
  Synthesized
gctcagatgaataattttcagcatattgctcag

SEQ ID NO: 6659 - DNA, 33 bp, Artificial Sequence
  Synthesized
gctcagatgaataattttcgtatgactgctcag

SEQ ID NO: 6660 - DNA, 33 bp, Artificial Sequence
  Synthesized
gctcagatgaataattttactcgtcctgctcag

SEQ ID NO: 6661 - DNA, 33 bp, Artificial Sequence
  Synthesized
gctcagatgaataatggttttgagcgtgctcag

SEQ ID NO: 6662 - DNA, 33 bp, Artificial Sequence
  Synthesized
gctcagatgaataatggttttcattatgctcag

SEQ ID NO: 6663 - DNA, 33 bp, Artificial Sequence
  Synthesized
gctcagatgaataatggttttaagcgtgctcag

SEQ ID NO: 6664 - DNA, 33 bp, Artificial Sequence
  Synthesized
gctcagatgaataatggttttatgaatgctcag

SEQ ID NO: 6665 - DNA, 33 bp, Artificial Sequence
  Synthesized
gctcagatgaataatggttttccttatgctcag

SEQ ID NO: 6666 - DNA, 33 bp, Artificial Sequence
  Synthesized
gctcagatgaataatggtttttatcctgctcag

SEQ ID NO: 6667 - DNA, 33 bp, Artificial Sequence
  Synthesized
gctcagatgaataatggtggtttggatgctcag

SEQ ID NO: 6668 - DNA, 33 bp, Artificial Sequence
  Synthesized
gctcagatgaataatggtggtcagtatgctcag

SEQ ID NO: 6669 - DNA, 33 bp, Artificial Sequence
  Synthesized
gctcagatgaataatggtggttcttttgctcag

SEQ ID NO: 6670 - DNA, 33 bp, Artificial Sequence
  Synthesized
gctcagatgaataatggtatgttgcatgctcag

SEQ ID NO: 6671 - DNA, 33 bp, Artificial Sequence
  Synthesized
gctcagatgaataatggtaatcctactgctcag

SEQ ID NO: 6672 - DNA, 33 bp, Artificial Sequence
  Synthesized
gctcagatgaataatggtcctaatcgtgctcag

SEQ ID NO: 6673 - DNA, 33 bp, Artificial Sequence
  Synthesized
gctcagatgaataatggtccttatcctgctcag

SEQ ID NO: 6674 - DNA, 33 bp, Artificial Sequence
  Synthesized
gctcagatgaataatggtcgtcgtgctgctcag

SEQ ID NO: 6675 - DNA, 33 bp, Artificial Sequence
  Synthesized
gctcagatgaataatggttctatgcatgctcag

SEQ ID NO: 6676 - DNA, 33 bp, Artificial Sequence
  Synthesized
gctcagatgaataatggttatgaggatgctcag

SEQ ID NO: 6677 - DNA, 33 bp, Artificial Sequence
  Synthesized
gctcagatgaataatggttattttttggctcag

SEQ ID NO: 6678 - DNA, 33 bp, Artificial Sequence
  Synthesized
gctcagatgaataatggttatggtcgtgctcag

SEQ ID NO: 6679 - DNA, 33 bp, Artificial Sequence
  Synthesized
gctcagatgaataatcattttgatcaggctcag

SEQ ID NO: 6680 - DNA, 33 bp, Artificial Sequence
  Synthesized
gctcagatgaataatcattttaagttggctcag

SEQ ID NO: 6681 - DNA, 33 bp, Artificial Sequence
  Synthesized
gctcagatgaataatcatttttatattgctcag

SEQ ID NO: 6682 - DNA, 33 bp, Artificial Sequence
  Synthesized
gctcagatgaataatcatggtggtaaggctcag

SEQ ID NO: 6683 - DNA, 33 bp, Artificial Sequence
  Synthesized
gctcagatgaataatcatggtggtttggctcag

SEQ ID NO: 6684 - DNA, 33 bp, Artificial Sequence
  Synthesized
gctcagatgaataatcatggttctactgctcag

SEQ ID NO: 6685 - DNA, 33 bp, Artificial Sequence
  Synthesized
gctcagatgaataatcatcatcatatggctcag

SEQ ID NO: 6686 - DNA, 33 bp, Artificial Sequence
  Synthesized
gctcagatgaataatcatcatcatcctgctcag

SEQ ID NO: 6687 - DNA, 33 bp, Artificial Sequence
  Synthesized
gctcagatgaataatcatcatatttatgctcag

SEQ ID NO: 6688 - DNA, 33 bp, Artificial Sequence
  Synthesized
gctcagatgaataatcatcattatattgctcag

SEQ ID NO: 6689 - DNA, 33 bp, Artificial Sequence
  Synthesized
gctcagatgaataatcataagtatggtgctcag

SEQ ID NO: 6690 - DNA, 33 bp, Artificial Sequence
  Synthesized
gctcagatgaataatcataatttttttgctcag

SEQ ID NO: 6691 - DNA, 33 bp, Artificial Sequence
  Synthesized
gctcagatgaataatcataatattaaggctcag

SEQ ID NO: 6692 - DNA, 33 bp, Artificial Sequence
  Synthesized
gctcagatgaataatcatcctgctcaggctcag

SEQ ID NO: 6693 - DNA, 33 bp, Artificial Sequence
  Synthesized
gctcagatgaataatcatccttttatggctcag

SEQ ID NO: 6694 - DNA, 33 bp, Artificial Sequence
  Synthesized
gctcagatgaataatcatcctggtcctgctcag

SEQ ID NO: 6695 - DNA, 33 bp, Artificial Sequence
  Synthesized
gctcagatgaataatcatcctcctggtgctcag

SEQ ID NO: 6696 - DNA, 33 bp, Artificial Sequence
  Synthesized
gctcagatgaataatcatcgtgatcaggctcag

SEQ ID NO: 6697 - DNA, 33 bp, Artificial Sequence
  Synthesized
gctcagatgaataatcatcgtattcaggctcag

SEQ ID NO: 6698 - DNA, 33 bp, Artificial Sequence
  Synthesized
gctcagatgaataatcatcgttattttgctcag

SEQ ID NO: 6699 - DNA, 33 bp, Artificial Sequence
  Synthesized
gctcagatgaataatcattctaatcatgctcag

SEQ ID NO: 6700 - DNA, 33 bp, Artificial Sequence
  Synthesized
gctcagatgaataatattcatggtcgtgctcag

SEQ ID NO: 6701 - DNA, 33 bp, Artificial Sequence
  Synthesized
gctcagatgaataatattattggtaatgctcag

SEQ ID NO: 6702 - DNA, 33 bp, Artificial Sequence
  Synthesized
gctcagatgaataatattaatttggctgctcag

SEQ ID NO: 6703 - DNA, 33 bp, Artificial Sequence
  Synthesized
gctcagatgaataatattcgtgatgttgctcag

SEQ ID NO: 6704 - DNA, 33 bp, Artificial Sequence
  Synthesized
gctcagatgaataatatttatgcttatgctcag

SEQ ID NO: 6705 - DNA, 33 bp, Artificial Sequence
  Synthesized
gctcagatgaataatatttattctggtgctcag

SEQ ID NO: 6706 - DNA, 33 bp, Artificial Sequence
  Synthesized
gctcagatgaataataagttttttggtgctcag

SEQ ID NO: 6707 - DNA, 33 bp, Artificial Sequence
  Synthesized
gctcagatgaataataagtttatttctgctcag

SEQ ID NO: 6708 - DNA, 33 bp, Artificial Sequence
  Synthesized
gctcagatgaataataagggttttcctgctcag

SEQ ID NO: 6709 - DNA, 33 bp, Artificial Sequence
  Synthesized
gctcagatgaataataagggtggttctgctcag

SEQ ID NO: 6710 - DNA, 33 bp, Artificial Sequence
  Synthesized
gctcagatgaataataagggtcctaaggctcag

SEQ ID NO: 6711 - DNA, 33 bp, Artificial Sequence
  Synthesized
gctcagatgaataataagcatttttttgctcag

SEQ ID NO: 6712 - DNA, 33 bp, Artificial Sequence
  Synthesized
gctcagatgaataataagatgggttttgctcag

SEQ ID NO: 6713 - DNA, 33 bp, Artificial Sequence
  Synthesized
gctcagatgaataataagcctcattttgctcag

SEQ ID NO: 6714 - DNA, 33 bp, Artificial Sequence
  Synthesized
gctcagatgaataataagcctattggtgctcag

SEQ ID NO: 6715 - DNA, 33 bp, Artificial Sequence
  Synthesized
gctcagatgaataataagcctaagcatgctcag

SEQ ID NO: 6716 - DNA, 33 bp, Artificial Sequence
  Synthesized
gctcagatgaataataagcctatgtatgctcag

SEQ ID NO: 6717 - DNA, 33 bp, Artificial Sequence
  Synthesized
gctcagatgaataataaggttggttatgctcag

SEQ ID NO: 6718 - DNA, 33 bp, Artificial Sequence
  Synthesized
gctcagatgaataatttgcattatcatgctcag

SEQ ID NO: 6719 - DNA, 33 bp, Artificial Sequence
  Synthesized
gctcagatgaataatttgaagaagcctgctcag

SEQ ID NO: 6720 - DNA, 33 bp, Artificial Sequence
  Synthesized
gctcagatgaataatttgttgaagcgtgctcag

SEQ ID NO: 6721 - DNA, 33 bp, Artificial Sequence
  Synthesized
gctcagatgaataatttgcctgattatgctcag

SEQ ID NO: 6722 - DNA, 33 bp, Artificial Sequence
  Synthesized
gctcagatgaataatttgcgttattatgctcag

SEQ ID NO: 6723 - DNA, 33 bp, Artificial Sequence
  Synthesized
gctcagatgaataatttgtcttatgttgctcag

SEQ ID NO: 6724 - DNA, 33 bp, Artificial Sequence
  Synthesized
gctcagatgaataatatggctgagactgctcag

SEQ ID NO: 6725 - DNA, 33 bp, Artificial Sequence
  Synthesized
gctcagatgaataatatgtttggtcatgctcag

SEQ ID NO: 6726 - DNA, 33 bp, Artificial Sequence
  Synthesized
gctcagatgaataatatgaagccttatgctcag

SEQ ID NO: 6727 - DNA, 33 bp, Artificial Sequence
  Synthesized
gctcagatgaataatatgaatccttttgctcag

SEQ ID NO: 6728 - DNA, 33 bp, Artificial Sequence
  Synthesized
gctcagatgaataatatgcagatggctgctcag

SEQ ID NO: 6729 - DNA, 33 bp, Artificial Sequence
  Synthesized
gctcagatgaataataattttaatcgtgctcag

SEQ ID NO: 6730 - DNA, 33 bp, Artificial Sequence
  Synthesized
gctcagatgaataataatcatccttttgctcag

SEQ ID NO: 6731 - DNA, 33 bp, Artificial Sequence
  Synthesized
gctcagatgaataataatcagcctcgtgctcag

SEQ ID NO: 6732 - DNA, 33 bp, Artificial Sequence
  Synthesized
gctcagatgaataataattctcgttttgctcag

SEQ ID NO: 6733 - DNA, 33 bp, Artificial Sequence
  Synthesized
gctcagatgaataatcctgctccttttgctcag

SEQ ID NO: 6734 - DNA, 33 bp, Artificial Sequence
  Synthesized
gctcagatgaataatcctgctcctggtgctcag

SEQ ID NO: 6735 - DNA, 33 bp, Artificial Sequence
  Synthesized
gctcagatgaataatcctgatcattttgctcag

SEQ ID NO: 6736 - DNA, 33 bp, Artificial Sequence
  Synthesized
gctcagatgaataatcctttttttcctgctcag

SEQ ID NO: 6737 - DNA, 33 bp, Artificial Sequence
  Synthesized
gctcagatgaataatccttttaagggtgctcag

SEQ ID NO: 6738 - DNA, 33 bp, Artificial Sequence
  Synthesized
gctcagatgaataatcctttttctgctgctcag

SEQ ID NO: 6739 - DNA, 33 bp, Artificial Sequence
  Synthesized
gctcagatgaataatccttttgttcatgctcag

SEQ ID NO: 6740 - DNA, 33 bp, Artificial Sequence
  Synthesized
gctcagatgaataatcctggtgagaatgctcag

SEQ ID NO: 6741 - DNA, 33 bp, Artificial Sequence
  Synthesized
gctcagatgaataatcctggtatgggtgctcag

SEQ ID NO: 6742 - DNA, 33 bp, Artificial Sequence
  Synthesized
gctcagatgaataatcctcatattggtgctcag

SEQ ID NO: 6743 - DNA, 33 bp, Artificial Sequence
  Synthesized
gctcagatgaataatcctcatatgcctgctcag

SEQ ID NO: 6744 - DNA, 33 bp, Artificial Sequence
  Synthesized
gctcagatgaataatcctattcatttggctcag

SEQ ID NO: 6745 - DNA, 33 bp, Artificial Sequence
  Synthesized
gctcagatgaataatcctaagcataaggctcag

SEQ ID NO: 6746 - DNA, 33 bp, Artificial Sequence
  Synthesized
gctcagatgaataatcctttgattcaggctcag

SEQ ID NO: 6747 - DNA, 33 bp, Artificial Sequence
  Synthesized
gctcagatgaataatcctttgcgtcgtgctcag

SEQ ID NO: 6748 - DNA, 33 bp, Artificial Sequence
  Synthesized
gctcagatgaataatcctaatgagattgctcag

SEQ ID NO: 6749 - DNA, 33 bp, Artificial Sequence
  Synthesized
gctcagatgaataatcctaatatggctgctcag

SEQ ID NO: 6750 - DNA, 33 bp, Artificial Sequence
  Synthesized
gctcagatgaataatcctaataatttggctcag

SEQ ID NO: 6751 - DNA, 33 bp, Artificial Sequence
  Synthesized
gctcagatgaataatcctcctcatggtgctcag

SEQ ID NO: 6752 - DNA, 33 bp, Artificial Sequence
  Synthesized
gctcagatgaataatcctccttcttttgctcag

SEQ ID NO: 6753 - DNA, 33 bp, Artificial Sequence
  Synthesized
gctcagatgaataatcctccttatttggctcag

SEQ ID NO: 6754 - DNA, 33 bp, Artificial Sequence
  Synthesized
gctcagatgaataatcctcgtcatcatgctcag

SEQ ID NO: 6755 - DNA, 33 bp, Artificial Sequence
  Synthesized
gctcagatgaataatcctcgtatgaaggctcag

SEQ ID NO: 6756 - DNA, 33 bp, Artificial Sequence
  Synthesized
gctcagatgaataatccttctcgtatggctcag

SEQ ID NO: 6757 - DNA, 33 bp, Artificial Sequence
  Synthesized
gctcagatgaataatccttcttatcgtgctcag

SEQ ID NO: 6758 - DNA, 33 bp, Artificial Sequence
  Synthesized
gctcagatgaataatcctactggtaaggctcag

SEQ ID NO: 6759 - DNA, 33 bp, Artificial Sequence
  Synthesized
gctcagatgaataatcctactggtcgtgctcag

SEQ ID NO: 6760 - DNA, 33 bp, Artificial Sequence
  Synthesized
gctcagatgaataatccttatggtaaggctcag

SEQ ID NO: 6761 - DNA, 33 bp, Artificial Sequence
  Synthesized
gctcagatgaataatccttatcgtaaggctcag

SEQ ID NO: 6762 - DNA, 33 bp, Artificial Sequence
  Synthesized
gctcagatgaataatccttattataaggctcag

SEQ ID NO: 6763 - DNA, 33 bp, Artificial Sequence
  Synthesized
gctcagatgaataatccttattataatgctcag

SEQ ID NO: 6764 - DNA, 33 bp, Artificial Sequence
  Synthesized
gctcagatgaataatcagcattatttggctcag

SEQ ID NO: 6765 - DNA, 33 bp, Artificial Sequence
  Synthesized
gctcagatgaataatcagaagacttatgctcag

SEQ ID NO: 6766 - DNA, 33 bp, Artificial Sequence
  Synthesized
gctcagatgaataatcgtgcttctgttgctcag

SEQ ID NO: 6767 - DNA, 33 bp, Artificial Sequence
  Synthesized
gctcagatgaataatcgtgcttatttggctcag

SEQ ID NO: 6768 - DNA, 33 bp, Artificial Sequence
  Synthesized
gctcagatgaataatcgttttaagcctgctcag

SEQ ID NO: 6769 - DNA, 33 bp, Artificial Sequence
  Synthesized
gctcagatgaataatcgtggttttattgctcag

SEQ ID NO: 6770 - DNA, 33 bp, Artificial Sequence
  Synthesized
gctcagatgaataatcgtggtaagcctgctcag

SEQ ID NO: 6771 - DNA, 33 bp, Artificial Sequence
  Synthesized
gctcagatgaataatcgtattggtggtgctcag

SEQ ID NO: 6772 - DNA, 33 bp, Artificial Sequence
  Synthesized
gctcagatgaataatcgtttgaagtatgctcag

SEQ ID NO: 6773 - DNA, 33 bp, Artificial Sequence
  Synthesized
gctcagatgaataatcgtcctggtcatgctcag

SEQ ID NO: 6774 - DNA, 33 bp, Artificial Sequence
  Synthesized
gctcagatgaataatcgtcgttttattgctcag

SEQ ID NO: 6775 - DNA, 33 bp, Artificial Sequence
  Synthesized
gctcagatgaataatcgtgttggttatgctcag

SEQ ID NO: 6776 - DNA, 33 bp, Artificial Sequence
  Synthesized
gctcagatgaataatcgttatgctgaggctcag

SEQ ID NO: 6777 - DNA, 33 bp, Artificial Sequence
  Synthesized
gctcagatgaataattctgctatggaggctcag

SEQ ID NO: 6778 - DNA, 33 bp, Artificial Sequence
  Synthesized
gctcagatgaataattctgatttgcaggctcag

SEQ ID NO: 6779 - DNA, 33 bp, Artificial Sequence
  Synthesized
gctcagatgaataattctgagcctgaggctcag

SEQ ID NO: 6780 - DNA, 33 bp, Artificial Sequence
  Synthesized
gctcagatgaataattcttttcgtcgtgctcag

SEQ ID NO: 6781 - DNA, 33 bp, Artificial Sequence
  Synthesized
gctcagatgaataattctggttattatgctcag

SEQ ID NO: 6782 - DNA, 33 bp, Artificial Sequence
  Synthesized
gctcagatgaataattctaagttttttgctcag

SEQ ID NO: 6783 - DNA, 33 bp, Artificial Sequence
  Synthesized
gctcagatgaataattctcagtttaatgctcag

SEQ ID NO: 6784 - DNA, 33 bp, Artificial Sequence
  Synthesized
gctcagatgaataattcttatgagcaggctcag

SEQ ID NO: 6785 - DNA, 33 bp, Artificial Sequence
  Synthesized
gctcagatgaataatactgagcgtcgtgctcag

SEQ ID NO: 6786 - DNA, 33 bp, Artificial Sequence
  Synthesized
gctcagatgaataatacttttgttcctgctcag

SEQ ID NO: 6787 - DNA, 33 bp, Artificial Sequence
  Synthesized
gctcagatgaataatactggtaagaaggctcag

SEQ ID NO: 6788 - DNA, 33 bp, Artificial Sequence
  Synthesized
gctcagatgaataatactcattttggtgctcag

SEQ ID NO: 6789 - DNA, 33 bp, Artificial Sequence
  Synthesized
gctcagatgaataatactcatcatcatgctcag

SEQ ID NO: 6790 - DNA, 33 bp, Artificial Sequence
  Synthesized
gctcagatgaataatactcataagtatgctcag

SEQ ID NO: 6791 - DNA, 33 bp, Artificial Sequence
  Synthesized
gctcagatgaataatactcatccttttgctcag

SEQ ID NO: 6792 - DNA, 33 bp, Artificial Sequence
  Synthesized
gctcagatgaataatactatttttcatgctcag

SEQ ID NO: 6793 - DNA, 33 bp, Artificial Sequence
  Synthesized
gctcagatgaataatactatgaatcgtgctcag

SEQ ID NO: 6794 - DNA, 33 bp, Artificial Sequence
  Synthesized
gctcagatgaataatactccttttcaggctcag

SEQ ID NO: 6795 - DNA, 33 bp, Artificial Sequence
  Synthesized
gctcagatgaataatactcgtgagaatgctcag

SEQ ID NO: 6796 - DNA, 33 bp, Artificial Sequence
  Synthesized
gctcagatgaataatactcgtaagcctgctcag

SEQ ID NO: 6797 - DNA, 33 bp, Artificial Sequence
  Synthesized
gctcagatgaataatactgttcgtgctgctcag

SEQ ID NO: 6798 - DNA, 33 bp, Artificial Sequence
  Synthesized
gctcagatgaataatacttatgtttctgctcag

SEQ ID NO: 6799 - DNA, 33 bp, Artificial Sequence
  Synthesized
gctcagatgaataatgttgatttgggtgctcag

SEQ ID NO: 6800 - DNA, 33 bp, Artificial Sequence
  Synthesized
gctcagatgaataatgttcgtcctaaggctcag

SEQ ID NO: 6801 - DNA, 33 bp, Artificial Sequence
  Synthesized
gctcagatgaataatgttactcgtatggctcag

SEQ ID NO: 6802 - DNA, 33 bp, Artificial Sequence
  Synthesized
gctcagatgaataattatgctgagaatgctcag

SEQ ID NO: 6803 - DNA, 33 bp, Artificial Sequence
  Synthesized
gctcagatgaataattatgctaattctgctcag

SEQ ID NO: 6804 - DNA, 33 bp, Artificial Sequence
  Synthesized
gctcagatgaataattatgatatgactgctcag

SEQ ID NO: 6805 - DNA, 33 bp, Artificial Sequence
  Synthesized
gctcagatgaataattattttgttgttgctcag

SEQ ID NO: 6806 - DNA, 33 bp, Artificial Sequence
  Synthesized
gctcagatgaataattatggtggtaatgctcag

SEQ ID NO: 6807 - DNA, 33 bp, Artificial Sequence
  Synthesized
gctcagatgaataattatcatgctgttgctcag

SEQ ID NO: 6808 - DNA, 33 bp, Artificial Sequence
  Synthesized
gctcagatgaataattatcatgatcatgctcag

SEQ ID NO: 6809 - DNA, 33 bp, Artificial Sequence
  Synthesized
gctcagatgaataattatcataagaatgctcag

SEQ ID NO: 6810 - DNA, 33 bp, Artificial Sequence
  Synthesized
gctcagatgaataattatcatgttcctgctcag

SEQ ID NO: 6811 - DNA, 33 bp, Artificial Sequence
  Synthesized
gctcagatgaataattatcattatttggctcag

SEQ ID NO: 6812 - DNA, 33 bp, Artificial Sequence
  Synthesized
gctcagatgaataattatattcgtggtgctcag

SEQ ID NO: 6813 - DNA, 33 bp, Artificial Sequence
  Synthesized
gctcagatgaataattataagggtcctgctcag

SEQ ID NO: 6814 - DNA, 33 bp, Artificial Sequence
  Synthesized
gctcagatgaataattataagcatcatgctcag

SEQ ID NO: 6815 - DNA, 33 bp, Artificial Sequence
  Synthesized
gctcagatgaataattataagccttctgctcag

SEQ ID NO: 6816 - DNA, 33 bp, Artificial Sequence
  Synthesized
gctcagatgaataattattctgatggtgctcag

SEQ ID NO: 6817 - DNA, 33 bp, Artificial Sequence
  Synthesized
gctcagatgaataattatactttgaaggctcag

SEQ ID NO: 6818 - DNA, 33 bp, Artificial Sequence
  Synthesized
gctcagatgaataattattatggttctgctcag

SEQ ID NO: 6819 - DNA, 33 bp, Artificial Sequence
  Synthesized
gctcagatgaatcctggtcgtaattctgctcag

SEQ ID NO: 6820 - DNA, 33 bp, Artificial Sequence
  Synthesized
gctcagatgaatcctactcgtggtcctgctcag

SEQ ID NO: 6821 - DNA, 33 bp, Artificial Sequence
  Synthesized
gctcagatgaatcctactcgtaaggctgctcag

SEQ ID NO: 6822 - DNA, 33 bp, Artificial Sequence
  Synthesized
gctcagatgaatcctactcgttatattgctcag

SEQ ID NO: 6823 - DNA, 33 bp, Artificial Sequence
  Synthesized
gctcagatgaatcctgttggtcgttctgctcag

SEQ ID NO: 6824 - DNA, 33 bp, Artificial Sequence
  Synthesized
gctcagatgaatcctgttaatcgttctgctcag

SEQ ID NO: 6825 - DNA, 33 bp, Artificial Sequence
  Synthesized
gctcagatgaatcctgttcctcgttctgctcag

SEQ ID NO: 6826 - DNA, 33 bp, Artificial Sequence
  Synthesized
gctcagatgaatcctgttactcgttctgctcag

SEQ ID NO: 6827 - DNA, 33 bp, Artificial Sequence
  Synthesized
gctcagatgaatcgtactcgtttgatggctcag

SEQ ID NO: 6828 - DNA, 33 bp, Artificial Sequence
  Synthesized
gctcagatgaatactttgaagtctgatgctcag

SEQ ID NO: 6829 - DNA, 33 bp, Artificial Sequence
  Synthesized
gctcagatgaatgttactcgtcatactgctcag

SEQ ID NO: 6830 - DNA, 33 bp, Artificial Sequence
  Synthesized
gctcagatgaattatactcgtgctattgctcag

SEQ ID NO: 6831 - DNA, 33 bp, Artificial Sequence
  Synthesized
gctcagatgcctgctgtttcttctaaggctcag

SEQ ID NO: 6832 - DNA, 33 bp, Artificial Sequence
  Synthesized
gctcagatgcctttgcctcgtggtcctgctcag

SEQ ID NO: 6833 - DNA, 33 bp, Artificial Sequence
  Synthesized
gctcagatgcctttgcctcgtcatcctgctcag

SEQ ID NO: 6834 - DNA, 33 bp, Artificial Sequence
  Synthesized
gctcagatgcctttgcgttctgctatggctcag

SEQ ID NO: 6835 - DNA, 33 bp, Artificial Sequence
  Synthesized
gctcagatgcctaatcctggttctcgtgctcag

SEQ ID NO: 6836 - DNA, 33 bp, Artificial Sequence
  Synthesized
gctcagatgcagcattctttgcctcctgctcag

SEQ ID NO: 6837 - DNA, 33 bp, Artificial Sequence
  Synthesized
gctcagatgcagatgccttcttttatggctcag

SEQ ID NO: 6838 - DNA, 33 bp, Artificial Sequence
  Synthesized
gctcagatgcagaatggtcgttctgttgctcag

SEQ ID NO: 6839 - DNA, 33 bp, Artificial Sequence
  Synthesized
gctcagatgcagcctcgtggttctgttgctcag

SEQ ID NO: 6840 - DNA, 33 bp, Artificial Sequence
  Synthesized
gctcagatgcagactttgggtttgcaggctcag

SEQ ID NO: 6841 - DNA, 33 bp, Artificial Sequence
  Synthesized
gctcagatgcgtgattcttcttcttctgctcag

SEQ ID NO: 6842 - DNA, 33 bp, Artificial Sequence
  Synthesized
gctcagatgcgtcatttttcttttatggctcag

SEQ ID NO: 6843 - DNA, 33 bp, Artificial Sequence
  Synthesized
gctcagatgcgtcctgctgcttctaatgctcag

SEQ ID NO: 6844 - DNA, 33 bp, Artificial Sequence
  Synthesized
gctcagatgcgtcaggatactaagttggctcag

SEQ ID NO: 6845 - DNA, 33 bp, Artificial Sequence
  Synthesized
gctcagatgcgttctcgtgatgatcatgctcag

SEQ ID NO: 6846 - DNA, 33 bp, Artificial Sequence
  Synthesized
gctcagatgtctggtcgtatggctcctgctcag

SEQ ID NO: 6847 - DNA, 33 bp, Artificial Sequence
  Synthesized
gctcagatgtctttgggtgcttctactgctcag

SEQ ID NO: 6848 - DNA, 33 bp, Artificial Sequence
  Synthesized
gctcagatgtctttgcctcgtgtttttgctcag

SEQ ID NO: 6849 - DNA, 33 bp, Artificial Sequence
  Synthesized
gctcagatgtctatgcagtctcgttctgctcag

SEQ ID NO: 6850 - DNA, 33 bp, Artificial Sequence
  Synthesized
gctcagatgtctccttctaataaggttgctcag

SEQ ID NO: 6851 - DNA, 33 bp, Artificial Sequence
  Synthesized
gctcagatgtctcagtcttctcagcgtgctcag

SEQ ID NO: 6852 - DNA, 33 bp, Artificial Sequence
  Synthesized
gctcagatgtctcagactgttactaaggctcag

SEQ ID NO: 6853 - DNA, 33 bp, Artificial Sequence
  Synthesized
gctcagatgtctcgtgctggtgctcctgctcag

SEQ ID NO: 6854 - DNA, 33 bp, Artificial Sequence
  Synthesized
gctcagatgtctcgtttgaatgatgctgctcag

SEQ ID NO: 6855 - DNA, 33 bp, Artificial Sequence
  Synthesized
gctcagatgtctcgtactactttgggtgctcag

SEQ ID NO: 6856 - DNA, 33 bp, Artificial Sequence
  Synthesized
gctcagatgtcttctatgttgtctaatgctcag

SEQ ID NO: 6857 - DNA, 33 bp, Artificial Sequence
  Synthesized
gctcagatgtcttctccttcttttatggctcag

SEQ ID NO: 6858 - DNA, 33 bp, Artificial Sequence
  Synthesized
gctcagatgtctactttgcctaatgttgctcag

SEQ ID NO: 6859 - DNA, 33 bp, Artificial Sequence
  Synthesized
gctcagatgtctactactttgtctaaggctcag

SEQ ID NO: 6860 - DNA, 33 bp, Artificial Sequence
  Synthesized
gctcagatgactgagcataaggctaaggctcag

SEQ ID NO: 6861 - DNA, 33 bp, Artificial Sequence
  Synthesized
gctcagatgactggtaagcagtttttggctcag

SEQ ID NO: 6862 - DNA, 33 bp, Artificial Sequence
  Synthesized
gctcagatgactggtcgttctaatcctgctcag

SEQ ID NO: 6863 - DNA, 33 bp, Artificial Sequence
  Synthesized
gctcagatgactcatggtgcttctggtgctcag

SEQ ID NO: 6864 - DNA, 33 bp, Artificial Sequence
  Synthesized
gctcagatgactcataatgttatgaatgctcag

SEQ ID NO: 6865 - DNA, 33 bp, Artificial Sequence
  Synthesized
gctcagatgactaatcgttctttgactgctcag

SEQ ID NO: 6866 - DNA, 33 bp, Artificial Sequence
  Synthesized
gctcagatgactcaggatactaagcgtgctcag

SEQ ID NO: 6867 - DNA, 33 bp, Artificial Sequence
  Synthesized
gctcagatgactcagtcttctcataaggctcag

SEQ ID NO: 6868 - DNA, 33 bp, Artificial Sequence
  Synthesized
gctcagatgacttctactttgcagtctgctcag

SEQ ID NO: 6869 - DNA, 33 bp, Artificial Sequence
  Synthesized
gctcagatgactactgctcctaatgctgctcag

SEQ ID NO: 6870 - DNA, 33 bp, Artificial Sequence
  Synthesized
gctcagatggttaaggatttgaatgttgctcag

SEQ ID NO: 6871 - DNA, 33 bp, Artificial Sequence
  Synthesized
gctcagatggttaaggatacttctgctgctcag

SEQ ID NO: 6872 - DNA, 33 bp, Artificial Sequence
  Synthesized
gctcagatggttaagaatcatgctcctgctcag

SEQ ID NO: 6873 - DNA, 33 bp, Artificial Sequence
  Synthesized
gctcagatggttttgcctcgtgcttatgctcag

SEQ ID NO: 6874 - DNA, 33 bp, Artificial Sequence
  Synthesized
gctcagatggttttgcctcgtatgaatgctcag

SEQ ID NO: 6875 - DNA, 33 bp, Artificial Sequence
  Synthesized
gctcagatggttaatatgcaggagaaggctcag

SEQ ID NO: 6876 - DNA, 33 bp, Artificial Sequence
  Synthesized
gctcagatggttcagaatcctcgtactgctcag

SEQ ID NO: 6877 - DNA, 33 bp, Artificial Sequence
  Synthesized
gctcagatggttcgtggtcctggtactgctcag

SEQ ID NO: 6878 - DNA, 33 bp, Artificial Sequence
  Synthesized
gctcagatggttcgtcctgttgaggttgctcag

SEQ ID NO: 6879 - DNA, 33 bp, Artificial Sequence
  Synthesized
gctcagatggtttctcctcgtggttctgctcag

SEQ ID NO: 6880 - DNA, 33 bp, Artificial Sequence
  Synthesized
gctcagaatgctgcttctggtatgaatgctcag

SEQ ID NO: 6881 - DNA, 33 bp, Artificial Sequence
  Synthesized
gctcagaatgctggtggtattgttcgtgctcag

SEQ ID NO: 6882 - DNA, 33 bp, Artificial Sequence
  Synthesized
gctcagaatgctggtcgtgagcatcatgctcag

SEQ ID NO: 6883 - DNA, 33 bp, Artificial Sequence
  Synthesized
gctcagaatgctggttatactactattgctcag

SEQ ID NO: 6884 - DNA, 33 bp, Artificial Sequence
  Synthesized
gctcagaatgctatttctacttctaatgctcag

SEQ ID NO: 6885 - DNA, 33 bp, Artificial Sequence
  Synthesized
gctcagaatgctaaggttggtgttattgctcag

SEQ ID NO: 6886 - DNA, 33 bp, Artificial Sequence
  Synthesized
gctcagaatgctaaggtttctgatcaggctcag

SEQ ID NO: 6887 - DNA, 33 bp, Artificial Sequence
  Synthesized
gctcagaatgctttgcattctgctcaggctcag

SEQ ID NO: 6888 - DNA, 33 bp, Artificial Sequence
  Synthesized
gctcagaatgctttgatgtctgctggtgctcag

SEQ ID NO: 6889 - DNA, 33 bp, Artificial Sequence
  Synthesized
gctcagaatgctttgcctttggctaatgctcag

SEQ ID NO: 6890 - DNA, 33 bp, Artificial Sequence
  Synthesized
gctcagaatgctaatggtaagttttatgctcag

SEQ ID NO: 6891 - DNA, 33 bp, Artificial Sequence
  Synthesized
gctcagaatgctcctgctttgcagggtgctcag

SEQ ID NO: 6892 - DNA, 33 bp, Artificial Sequence
  Synthesized
gctcagaatgctcaggatccttctcctgctcag

SEQ ID NO: 6893 - DNA, 33 bp, Artificial Sequence
  Synthesized
gctcagaatgctcgtattcatcaggctgctcag

SEQ ID NO: 6894 - DNA, 33 bp, Artificial Sequence
  Synthesized
gctcagaatgctcgtcgtgatcgtcctgctcag

SEQ ID NO: 6895 - DNA, 33 bp, Artificial Sequence
  Synthesized
gctcagaatgcttctgttaagttgaatgctcag

SEQ ID NO: 6896 - DNA, 33 bp, Artificial Sequence
  Synthesized
gctcagaatgctactgagcgtcctcgtgctcag

SEQ ID NO: 6897 - DNA, 33 bp, Artificial Sequence
  Synthesized
gctcagaatgctgttcgtgatactgttgctcag

SEQ ID NO: 6898 - DNA, 33 bp, Artificial Sequence
  Synthesized
gctcagaatgctgttcgttcttcttctgctcag

SEQ ID NO: 6899 - DNA, 33 bp, Artificial Sequence
  Synthesized
gctcagaatgctgtttcttctggttctgctcag

SEQ ID NO: 6900 - DNA, 33 bp, Artificial Sequence
  Synthesized
gctcagaatgatgcttttcgtgctcaggctcag

SEQ ID NO: 6901 - DNA, 33 bp, Artificial Sequence
  Synthesized
gctcagaatgattttcagcgtactaaggctcag

SEQ ID NO: 6902 - DNA, 33 bp, Artificial Sequence
  Synthesized
gctcagaatgatcgtttgttgattaatgctcag

SEQ ID NO: 6903 - DNA, 33 bp, Artificial Sequence
  Synthesized
gctcagaatgagaagcattctgtttctgctcag

SEQ ID NO: 6904 - DNA, 33 bp, Artificial Sequence
  Synthesized
gctcagaatgagtctattactcgtaatgctcag

SEQ ID NO: 6905 - DNA, 33 bp, Artificial Sequence
  Synthesized
gctcagaattttcatcctggtgatcgtgctcag

SEQ ID NO: 6906 - DNA, 33 bp, Artificial Sequence
  Synthesized
gctcagaattttttgcctcagggtgaggctcag

SEQ ID NO: 6907 - DNA, 33 bp, Artificial Sequence
  Synthesized
gctcagaattttttgcctcgttatcctgctcag

SEQ ID NO: 6908 - DNA, 33 bp, Artificial Sequence
  Synthesized
gctcagaattttaataagcagaattctgctcag

SEQ ID NO: 6909 - DNA, 33 bp, Artificial Sequence
  Synthesized
gctcagaattttcagactatgcagactgctcag

SEQ ID NO: 6910 - DNA, 33 bp, Artificial Sequence
  Synthesized
gctcagaattttcgtgataatttgactgctcag

SEQ ID NO: 6911 - DNA, 33 bp, Artificial Sequence
  Synthesized
gctcagaatggtgctgagttgcctcgtgctcag

SEQ ID NO: 6912 - DNA, 33 bp, Artificial Sequence
  Synthesized
gctcagaatggtggtactttgcgtggtgctcag

SEQ ID NO: 6913 - DNA, 33 bp, Artificial Sequence
  Synthesized
gctcagaatggtcatactttgtttactgctcag

SEQ ID NO: 6914 - DNA, 33 bp, Artificial Sequence
  Synthesized
gctcagaatggtttgcctgatgttcctgctcag

SEQ ID NO: 6915 - DNA, 33 bp, Artificial Sequence
  Synthesized
gctcagaatggtttgcctcgtcataaggctcag

SEQ ID NO: 6916 - DNA, 33 bp, Artificial Sequence
  Synthesized
gctcagaatggtatgactttgcgtaatgctcag

SEQ ID NO: 6917 - DNA, 33 bp, Artificial Sequence
  Synthesized
gctcagaatggtcctactcgtttggctgctcag

SEQ ID NO: 6918 - DNA, 33 bp, Artificial Sequence
  Synthesized
gctcagaatggtcctactactattcgtgctcag

SEQ ID NO: 6919 - DNA, 33 bp, Artificial Sequence
  Synthesized
gctcagaatggtcctgttggtcgtattgctcag

SEQ ID NO: 6920 - DNA, 33 bp, Artificial Sequence
  Synthesized
gctcagaatggttctaagaagatttctgctcag

SEQ ID NO: 6921 - DNA, 33 bp, Artificial Sequence
  Synthesized
gctcagaatggttctaagactattcctgctcag

SEQ ID NO: 6922 - DNA, 33 bp, Artificial Sequence
  Synthesized
gctcagaatggttctaagactattactgctcag

SEQ ID NO: 6923 - DNA, 33 bp, Artificial Sequence
  Synthesized
gctcagaatggttctatgcgtgcttatgctcag

SEQ ID NO: 6924 - DNA, 33 bp, Artificial Sequence
  Synthesized
gctcagaatggttctcgtggtgctgctgctcag

SEQ ID NO: 6925 - DNA, 33 bp, Artificial Sequence
  Synthesized
gctcagaatggttctcgtcctcagattgctcag

SEQ ID NO: 6926 - DNA, 33 bp, Artificial Sequence
  Synthesized
gctcagaatggttctcgtgttattgctgctcag

SEQ ID NO: 6927 - DNA, 33 bp, Artificial Sequence
  Synthesized
gctcagaatggtactcgtatgacttctgctcag

SEQ ID NO: 6928 - DNA, 33 bp, Artificial Sequence
  Synthesized
gctcagaatggttataagactatttctgctcag

SEQ ID NO: 6929 - DNA, 33 bp, Artificial Sequence
  Synthesized
gctcagaatcatttgcctcgtgatcctgctcag

SEQ ID NO: 6930 - DNA, 33 bp, Artificial Sequence
  Synthesized
gctcagaatcatttgcctcgtaatttggctcag

SEQ ID NO: 6931 - DNA, 33 bp, Artificial Sequence
  Synthesized
gctcagaatcatttgccttctgctatggctcag

SEQ ID NO: 6932 - DNA, 33 bp, Artificial Sequence
  Synthesized
gctcagaatcatcgttcttctatttctgctcag

SEQ ID NO: 6933 - DNA, 33 bp, Artificial Sequence
  Synthesized
gctcagaatcatgttgctggtacttttgctcag

SEQ ID NO: 6934 - DNA, 33 bp, Artificial Sequence
  Synthesized
gctcagaatattggtcctgttcataaggctcag

SEQ ID NO: 6935 - DNA, 33 bp, Artificial Sequence
  Synthesized
gctcagaatattggttatgcttctcctgctcag

SEQ ID NO: 6936 - DNA, 33 bp, Artificial Sequence
  Synthesized
gctcagaatattcattctgcttcttctgctcag

SEQ ID NO: 6937 - DNA, 33 bp, Artificial Sequence
  Synthesized
gctcagaatattcattcttctgttggtgctcag

SEQ ID NO: 6938 - DNA, 33 bp, Artificial Sequence
  Synthesized
gctcagaatattcctggtggtatgattgctcag

SEQ ID NO: 6939 - DNA, 33 bp, Artificial Sequence
  Synthesized
gctcagaatattcagactgttaataatgctcag

SEQ ID NO: 6940 - DNA, 33 bp, Artificial Sequence
  Synthesized
gctcagaatattgttggtaagtttgaggctcag

SEQ ID NO: 6941 - DNA, 33 bp, Artificial Sequence
  Synthesized
gctcagaataagggttttcaggatgctgctcag

SEQ ID NO: 6942 - DNA, 33 bp, Artificial Sequence
  Synthesized
gctcagaataagcatggttcttttatggctcag

SEQ ID NO: 6943 - DNA, 33 bp, Artificial Sequence
  Synthesized
gctcagaataagaagggttctgctatggctcag

SEQ ID NO: 6944 - DNA, 33 bp, Artificial Sequence
  Synthesized
gctcagaataagatgtctttggctgttgctcag

SEQ ID NO: 6945 - DNA, 33 bp, Artificial Sequence
  Synthesized
gctcagaataagcctgcttttcctcaggctcag

SEQ ID NO: 6946 - DNA, 33 bp, Artificial Sequence
  Synthesized
gctcagaataagcagaatacttctattgctcag

SEQ ID NO: 6947 - DNA, 33 bp, Artificial Sequence
  Synthesized
gctcagaataagactgctgttactgctgctcag

SEQ ID NO: 6948 - DNA, 33 bp, Artificial Sequence
  Synthesized
gctcagaatttggctgattctcgtattgctcag

SEQ ID NO: 6949 - DNA, 33 bp, Artificial Sequence
  Synthesized
gctcagaatttggctcgtgagcctaaggctcag

SEQ ID NO: 6950 - DNA, 33 bp, Artificial Sequence
  Synthesized
gctcagaatttggctcgtaatttgtctgctcag

SEQ ID NO: 6951 - DNA, 33 bp, Artificial Sequence
  Synthesized
gctcagaatttggctcgtcctcattctgctcag

SEQ ID NO: 6952 - DNA, 33 bp, Artificial Sequence
  Synthesized
gctcagaatttgggtgagttgtctaatgctcag

SEQ ID NO: 6953 - DNA, 33 bp, Artificial Sequence
  Synthesized
gctcagaatttgcataatgttcctgaggctcag

SEQ ID NO: 6954 - DNA, 33 bp, Artificial Sequence
  Synthesized
gctcagaatttgcatgttattcagaatgctcag

SEQ ID NO: 6955 - DNA, 33 bp, Artificial Sequence
  Synthesized
gctcagaatttgattttgaatggtcctgctcag

SEQ ID NO: 6956 - DNA, 33 bp, Artificial Sequence
  Synthesized
gctcagaatttgttgcctggtgttcatgctcag

SEQ ID NO: 6957 - DNA, 33 bp, Artificial Sequence
  Synthesized
gctcagaatttgttgcgtaattctcctgctcag

SEQ ID NO: 6958 - DNA, 33 bp, Artificial Sequence
  Synthesized
gctcagaatttgttgactactcatcaggctcag

SEQ ID NO: 6959 - DNA, 33 bp, Artificial Sequence
  Synthesized
gctcagaatttgatggagaattctcgtgctcag

SEQ ID NO: 6960 - DNA, 33 bp, Artificial Sequence
  Synthesized
gctcagaatttgatgaagggtcagaatgctcag

SEQ ID NO: 6961 - DNA, 33 bp, Artificial Sequence
  Synthesized
gctcagaatttgaatgttcagaagtctgctcag

SEQ ID NO: 6962 - DNA, 33 bp, Artificial Sequence
  Synthesized
gctcagaatttgcctattactgttgttgctcag

SEQ ID NO: 6963 - DNA, 33 bp, Artificial Sequence
  Synthesized
gctcagaatttgcctcgtactgttgaggctcag

SEQ ID NO: 6964 - DNA, 33 bp, Artificial Sequence
  Synthesized
gctcagaatttgcagaagattcctgctgctcag

SEQ ID NO: 6965 - DNA, 33 bp, Artificial Sequence
  Synthesized
gctcagaatttgcaggtttctaaggaggctcag

SEQ ID NO: 6966 - DNA, 33 bp, Artificial Sequence
  Synthesized
gctcagaatttgactaattctatgaaggctcag

SEQ ID NO: 6967 - DNA, 33 bp, Artificial Sequence
  Synthesized
gctcagaatttgactcgtcatttgcctgctcag

SEQ ID NO: 6968 - DNA, 33 bp, Artificial Sequence
  Synthesized
gctcagaatttggttcctcagtctcgtgctcag

SEQ ID NO: 6969 - DNA, 33 bp, Artificial Sequence
  Synthesized
gctcagaatttggtttcttctgagaaggctcag

SEQ ID NO: 6970 - DNA, 33 bp, Artificial Sequence
  Synthesized
gctcagaatttggttgttgatcattatgctcag

SEQ ID NO: 6971 - DNA, 33 bp, Artificial Sequence
  Synthesized
gctcagaatatgcataattctattttggctcag

SEQ ID NO: 6972 - DNA, 33 bp, Artificial Sequence
  Synthesized
gctcagaatatgcatcagatttctgctgctcag

SEQ ID NO: 6973 - DNA, 33 bp, Artificial Sequence
  Synthesized
gctcagaatatgaataattcttttatggctcag

SEQ ID NO: 6974 - DNA, 33 bp, Artificial Sequence
  Synthesized
gctcagaatatgaatcctcgtggtgatgctcag

SEQ ID NO: 6975 - DNA, 33 bp, Artificial Sequence
  Synthesized
gctcagaatatgcctcgtactggtcaggctcag

SEQ ID NO: 6976 - DNA, 33 bp, Artificial Sequence
  Synthesized
gctcagaatatgcctcgtactattcctgctcag

SEQ ID NO: 6977 - DNA, 33 bp, Artificial Sequence
  Synthesized
gctcagaatatgcagtatactaagtctgctcag

SEQ ID NO: 6978 - DNA, 33 bp, Artificial Sequence
  Synthesized
gctcagaatatgtctttgaagactgatgctcag

SEQ ID NO: 6979 - DNA, 33 bp, Artificial Sequence
  Synthesized
gctcagaataatgctactcgttttttggctcag

SEQ ID NO: 6980 - DNA, 33 bp, Artificial Sequence
  Synthesized
gctcagaataatgctactcgtcattttgctcag

SEQ ID NO: 6981 - DNA, 33 bp, Artificial Sequence
  Synthesized
gctcagaataattttactcgtgttgaggctcag

SEQ ID NO: 6982 - DNA, 33 bp, Artificial Sequence
  Synthesized
gctcagaataatggtactcgttattttgctcag

SEQ ID NO: 6983 - DNA, 33 bp, Artificial Sequence
  Synthesized
gctcagaataatcatactcgtcgtatggctcag

SEQ ID NO: 6984 - DNA, 33 bp, Artificial Sequence
  Synthesized
gctcagaataatattggtcatcagcgtgctcag

SEQ ID NO: 6985 - DNA, 33 bp, Artificial Sequence
  Synthesized
gctcagaataatattcagcctgttaatgctcag

SEQ ID NO: 6986 - DNA, 33 bp, Artificial Sequence
  Synthesized
gctcagaataataagactcgtttgcatgctcag

SEQ ID NO: 6987 - DNA, 33 bp, Artificial Sequence
  Synthesized
gctcagaataatttgatgtctatgaaggctcag

SEQ ID NO: 6988 - DNA, 33 bp, Artificial Sequence
  Synthesized
gctcagaataatatgactcgtcagactgctcag

SEQ ID NO: 6989 - DNA, 33 bp, Artificial Sequence
  Synthesized
gctcagaataataatactgctttgcctgctcag

SEQ ID NO: 6990 - DNA, 33 bp, Artificial Sequence
  Synthesized
gctcagaataataatactcattatggtgctcag

SEQ ID NO: 6991 - DNA, 33 bp, Artificial Sequence
  Synthesized
gctcagaataataatactcgtttttatgctcag

SEQ ID NO: 6992 - DNA, 33 bp, Artificial Sequence
  Synthesized
gctcagaataataatactcgtactaaggctcag

SEQ ID NO: 6993 - DNA, 33 bp, Artificial Sequence
  Synthesized
gctcagaataatcctaagcgtcgttctgctcag

SEQ ID NO: 6994 - DNA, 33 bp, Artificial Sequence
  Synthesized
gctcagaataatcctactcgtcctcatgctcag

SEQ ID NO: 6995 - DNA, 33 bp, Artificial Sequence
  Synthesized
gctcagaataatcctactcgtccttctgctcag

SEQ ID NO: 6996 - DNA, 33 bp, Artificial Sequence
  Synthesized
gctcagaataatcctgttcatcgttctgctcag

SEQ ID NO: 6997 - DNA, 33 bp, Artificial Sequence
  Synthesized
gctcagaataatcctgttaatcgttctgctcag

SEQ ID NO: 6998 - DNA, 33 bp, Artificial Sequence
  Synthesized
gctcagaataatcctgttcctcgttctgctcag

SEQ ID NO: 6999 - DNA, 33 bp, Artificial Sequence
  Synthesized
gctcagaataatcctgttactcgtactgctcag

SEQ ID NO: 7000 - DNA, 33 bp, Artificial Sequence
  Synthesized
gctcagaataatcagttgactcgttctgctcag

SEQ ID NO: 7001 - DNA, 33 bp, Artificial Sequence
  Synthesized
gctcagaataatcgtatttctgctaatgctcag

SEQ ID NO: 7002 - DNA, 33 bp, Artificial Sequence
  Synthesized
gctcagaataatcgtattacttctaatgctcag

SEQ ID NO: 7003 - DNA, 33 bp, Artificial Sequence
  Synthesized
gctcagaataatcgtactcgtgctcatgctcag

SEQ ID NO: 7004 - DNA, 33 bp, Artificial Sequence
  Synthesized
gctcagaataatcgtactcgtcattatgctcag

SEQ ID NO: 7005 - DNA, 33 bp, Artificial Sequence
  Synthesized
gctcagaataattctggtttggctaaggctcag

SEQ ID NO: 7006 - DNA, 33 bp, Artificial Sequence
  Synthesized
gctcagaataatgttgttcgttctactgctcag

SEQ ID NO: 7007 - DNA, 33 bp, Artificial Sequence
  Synthesized
gctcagaatcctgctttgtattctgatgctcag

SEQ ID NO: 7008 - DNA, 33 bp, Artificial Sequence
  Synthesized
gctcagaatcctgcttctttgattactgctcag

SEQ ID NO: 7009 - DNA, 33 bp, Artificial Sequence
  Synthesized
gctcagaatcctgcttctaatcgtgaggctcag

SEQ ID NO: 7010 - DNA, 33 bp, Artificial Sequence
  Synthesized
gctcagaatcctggtcgtccttatcatgctcag

SEQ ID NO: 7011 - DNA, 33 bp, Artificial Sequence
  Synthesized
gctcagaatcctggtcgtgtttctttggctcag

SEQ ID NO: 7012 - DNA, 33 bp, Artificial Sequence
  Synthesized
gctcagaatcctattcgtggtaatgctgctcag

SEQ ID NO: 7013 - DNA, 33 bp, Artificial Sequence
  Synthesized
gctcagaatcctaaggttatttcttctgctcag

SEQ ID NO: 7014 - DNA, 33 bp, Artificial Sequence
  Synthesized
gctcagaatcctttgcctcgtggtgatgctcag

SEQ ID NO: 7015 - DNA, 33 bp, Artificial Sequence
  Synthesized
gctcagaatcctttgcctcgtcataaggctcag

SEQ ID NO: 7016 - DNA, 33 bp, Artificial Sequence
  Synthesized
gctcagaatcctttgcctcgtcatgttgctcag

SEQ ID NO: 7017 - DNA, 33 bp, Artificial Sequence
  Synthesized
gctcagaatcctttgtctgttaatcgtgctcag

SEQ ID NO: 7018 - DNA, 33 bp, Artificial Sequence
  Synthesized
gctcagaatccttctaagttgcatactgctcag

SEQ ID NO: 7019 - DNA, 33 bp, Artificial Sequence
  Synthesized
gctcagaatccttctcgtactgttggtgctcag

SEQ ID NO: 7020 - DNA, 33 bp, Artificial Sequence
  Synthesized
gctcagaatccttcttctcagtctgatgctcag

SEQ ID NO: 7021 - DNA, 33 bp, Artificial Sequence
  Synthesized
gctcagaatccttctacttctaagtatgctcag

SEQ ID NO: 7022 - DNA, 33 bp, Artificial Sequence
  Synthesized
gctcagaatcctactcgttctttgtctgctcag

SEQ ID NO: 7023 - DNA, 33 bp, Artificial Sequence
  Synthesized
gctcagaatcaggatcgtcctcattctgctcag

SEQ ID NO: 7024 - DNA, 33 bp, Artificial Sequence
  Synthesized
gctcagaatcagtttaagcagggtgctgctcag

SEQ ID NO: 7025 - DNA, 33 bp, Artificial Sequence
  Synthesized
gctcagaatcagaagccttctttgttggctcag

SEQ ID NO: 7026 - DNA, 33 bp, Artificial Sequence
  Synthesized
gctcagaatcagaagcaggttactactgctcag

SEQ ID NO: 7027 - DNA, 33 bp, Artificial Sequence
  Synthesized
gctcagaatcagttggctcctaagtctgctcag

SEQ ID NO: 7028 - DNA, 33 bp, Artificial Sequence
  Synthesized
gctcagaatcagttgttgcgtcagggtgctcag

SEQ ID NO: 7029 - DNA, 33 bp, Artificial Sequence
  Synthesized
gctcagaatcagttgatgattcctgatgctcag

SEQ ID NO: 7030 - DNA, 33 bp, Artificial Sequence
  Synthesized
gctcagaatcagttgcagatggagattgctcag

SEQ ID NO: 7031 - DNA, 33 bp, Artificial Sequence
  Synthesized
gctcagaatcagttgcgtcgtgaggaggctcag

SEQ ID NO: 7032 - DNA, 33 bp, Artificial Sequence
  Synthesized
gctcagaatcagccttctgctcagatggctcag

SEQ ID NO: 7033 - DNA, 33 bp, Artificial Sequence
  Synthesized
gctcagaatcagtctcagtatactaaggctcag

SEQ ID NO: 7034 - DNA, 33 bp, Artificial Sequence
  Synthesized
gctcagaatcagtcttctgttaagtctgctcag

SEQ ID NO: 7035 - DNA, 33 bp, Artificial Sequence
  Synthesized
gctcagaatcagtcttatactcatatggctcag

SEQ ID NO: 7036 - DNA, 33 bp, Artificial Sequence
  Synthesized
gctcagaatcagactaagcagggtttggctcag

SEQ ID NO: 7037 - DNA, 33 bp, Artificial Sequence
  Synthesized
gctcagaatcgtttggctcctactattgctcag

SEQ ID NO: 7038 - DNA, 33 bp, Artificial Sequence
  Synthesized
gctcagaatcgtttgcctaatgatgctgctcag

SEQ ID NO: 7039 - DNA, 33 bp, Artificial Sequence
  Synthesized
gctcagaatcgtttgcctcgtggtttggctcag

SEQ ID NO: 7040 - DNA, 33 bp, Artificial Sequence
  Synthesized
gctcagaatcgttctgatggtgctcaggctcag

SEQ ID NO: 7041 - DNA, 33 bp, Artificial Sequence
  Synthesized
gctcagaatcgttctaagactatttctgctcag

SEQ ID NO: 7042 - DNA, 33 bp, Artificial Sequence
  Synthesized
gctcagaatcgttcttctgatactactgctcag

SEQ ID NO: 7043 - DNA, 33 bp, Artificial Sequence
  Synthesized
gctcagaatcgtgttgctcagggtgaggctcag

SEQ ID NO: 7044 - DNA, 33 bp, Artificial Sequence
  Synthesized
gctcagaatcgtgttttgaatgttgatgctcag

SEQ ID NO: 7045 - DNA, 33 bp, Artificial Sequence
  Synthesized
gctcagaattctgcttctcgtttgactgctcag

SEQ ID NO: 7046 - DNA, 33 bp, Artificial Sequence
  Synthesized
gctcagaattctggtttgactatgaaggctcag

SEQ ID NO: 7047 - DNA, 33 bp, Artificial Sequence
  Synthesized
gctcagaattctggtaattggcagtctgctcag

SEQ ID NO: 7048 - DNA, 33 bp, Artificial Sequence
  Synthesized
gctcagaattctggtcagtatgctactgctcag

SEQ ID NO: 7049 - DNA, 33 bp, Artificial Sequence
  Synthesized
gctcagaattctggtcgttctggtttggctcag

SEQ ID NO: 7050 - DNA, 33 bp, Artificial Sequence
  Synthesized
gctcagaattctggtcgtactattggtgctcag

SEQ ID NO: 7051 - DNA, 33 bp, Artificial Sequence
  Synthesized
gctcagaattctcatcctgtttctactgctcag

SEQ ID NO: 7052 - DNA, 33 bp, Artificial Sequence
  Synthesized
gctcagaattctattcgttctaataatgctcag

SEQ ID NO: 7053 - DNA, 33 bp, Artificial Sequence
  Synthesized
gctcagaattctttggatactatggctgctcag

SEQ ID NO: 7054 - DNA, 33 bp, Artificial Sequence
  Synthesized
gctcagaattctttgggtcagcataaggctcag

SEQ ID NO: 7055 - DNA, 33 bp, Artificial Sequence
  Synthesized
gctcagaattctttgatgactgagcctgctcag

SEQ ID NO: 7056 - DNA, 33 bp, Artificial Sequence
  Synthesized
gctcagaattctttgaatgctatgtctgctcag

SEQ ID NO: 7057 - DNA, 33 bp, Artificial Sequence
  Synthesized
gctcagaattctttgcctcgtcaggatgctcag

SEQ ID NO: 7058 - DNA, 33 bp, Artificial Sequence
  Synthesized
gctcagaattctatgcatactactcgtgctcag

SEQ ID NO: 7059 - DNA, 33 bp, Artificial Sequence
  Synthesized
gctcagaattctatgcgtgctgatgttgctcag

SEQ ID NO: 7060 - DNA, 33 bp, Artificial Sequence
  Synthesized
gctcagaattctcctttgcctcgtcaggctcag

SEQ ID NO: 7061 - DNA, 33 bp, Artificial Sequence
  Synthesized
gctcagaattctcagatgaagtatgctgctcag

SEQ ID NO: 7062 - DNA, 33 bp, Artificial Sequence
  Synthesized
gctcagaattctcagactcctcatcgtgctcag

SEQ ID NO: 7063 - DNA, 33 bp, Artificial Sequence
  Synthesized
gctcagaattctcgtttggctgcttctgctcag

SEQ ID NO: 7064 - DNA, 33 bp, Artificial Sequence
  Synthesized
gctcagaattctcgtttgaatactgctgctcag

SEQ ID NO: 7065 - DNA, 33 bp, Artificial Sequence
  Synthesized
gctcagaattctcgtccttcttctaatgctcag

SEQ ID NO: 7066 - DNA, 33 bp, Artificial Sequence
  Synthesized
gctcagaattctcgttctgttattggtgctcag

SEQ ID NO: 7067 - DNA, 33 bp, Artificial Sequence
  Synthesized
gctcagaattctcgtgttttgaatgctgctcag

SEQ ID NO: 7068 - DNA, 33 bp, Artificial Sequence
  Synthesized
gctcagaattctcgtgttaatttgcatgctcag

SEQ ID NO: 7069 - DNA, 33 bp, Artificial Sequence
  Synthesized
gctcagaattcttctgcttttacttctgctcag

SEQ ID NO: 7070 - DNA, 33 bp, Artificial Sequence
  Synthesized
gctcagaattcttctaagttggctttggctcag

SEQ ID NO: 7071 - DNA, 33 bp, Artificial Sequence
  Synthesized
gctcagaattcttctcctttgttgcctgctcag

SEQ ID NO: 7072 - DNA, 33 bp, Artificial Sequence
  Synthesized
gctcagaattcttctcgtttgccttctgctcag

SEQ ID NO: 7073 - DNA, 33 bp, Artificial Sequence
  Synthesized
gctcagaattcttctcgtactaatttggctcag

SEQ ID NO: 7074 - DNA, 33 bp, Artificial Sequence
  Synthesized
gctcagaattctactatgactggtcgtgctcag

SEQ ID NO: 7075 - DNA, 33 bp, Artificial Sequence
  Synthesized
gctcagaattctactcgtacttctttggctcag

SEQ ID NO: 7076 - DNA, 33 bp, Artificial Sequence
  Synthesized
gctcagaattctgttaagttggatattgctcag

SEQ ID NO: 7077 - DNA, 33 bp, Artificial Sequence
  Synthesized
gctcagaattctgttaagcagactactgctcag

SEQ ID NO: 7078 - DNA, 33 bp, Artificial Sequence
  Synthesized
gctcagaattctgttgttgctcgtggtgctcag

SEQ ID NO: 7079 - DNA, 33 bp, Artificial Sequence
  Synthesized
gctcagaattcttatattactcatcaggctcag

SEQ ID NO: 7080 - DNA, 33 bp, Artificial Sequence
  Synthesized
gctcagaatactgctgttaataagtatgctcag

SEQ ID NO: 7081 - DNA, 33 bp, Artificial Sequence
  Synthesized
gctcagaatactggtttttctgctatggctcag

SEQ ID NO: 7082 - DNA, 33 bp, Artificial Sequence
  Synthesized
gctcagaatactcatactcagggtcgtgctcag

SEQ ID NO: 7083 - DNA, 33 bp, Artificial Sequence
  Synthesized
gctcagaatactattccttcttctgctgctcag

SEQ ID NO: 7084 - DNA, 33 bp, Artificial Sequence
  Synthesized
gctcagaatactattcagttgactgctgctcag

SEQ ID NO: 7085 - DNA, 33 bp, Artificial Sequence
  Synthesized
gctcagaatactaagcctgctaatgttgctcag

SEQ ID NO: 7086 - DNA, 33 bp, Artificial Sequence
  Synthesized
gctcagaatactttggctactttgtctgctcag

SEQ ID NO: 7087 - DNA, 33 bp, Artificial Sequence
  Synthesized
gctcagaatactttgactgatactaaggctcag

SEQ ID NO: 7088 - DNA, 33 bp, Artificial Sequence
  Synthesized
gctcagaatactaatattactatgaaggctcag

SEQ ID NO: 7089 - DNA, 33 bp, Artificial Sequence
  Synthesized
gctcagaatactcctcctgatcgtaaggctcag

SEQ ID NO: 7090 - DNA, 33 bp, Artificial Sequence
  Synthesized
gctcagaatactcagcgtgatgttatggctcag

SEQ ID NO: 7091 - DNA, 33 bp, Artificial Sequence
  Synthesized
gctcagaatactcgtgatgctttgtctgctcag

SEQ ID NO: 7092 - DNA, 33 bp, Artificial Sequence
  Synthesized
gctcagaatactcgtggtgtttcttctgctcag

SEQ ID NO: 7093 - DNA, 33 bp, Artificial Sequence
  Synthesized
gctcagaatactcgtacttctttgcctgctcag

SEQ ID NO: 7094 - DNA, 33 bp, Artificial Sequence
  Synthesized
gctcagaatacttctcatcgtgatcaggctcag

SEQ ID NO: 7095 - DNA, 33 bp, Artificial Sequence
  Synthesized
gctcagaatactactggtcgtactatggctcag

SEQ ID NO: 7096 - DNA, 33 bp, Artificial Sequence
  Synthesized
gctcagaatactactaaggctcctttggctcag

SEQ ID NO: 7097 - DNA, 33 bp, Artificial Sequence
  Synthesized
gctcagaatactacttctcgttctggtgctcag

SEQ ID NO: 7098 - DNA, 33 bp, Artificial Sequence
  Synthesized
gctcagaatactacttctcgtactcctgctcag

SEQ ID NO: 7099 - DNA, 33 bp, Artificial Sequence
  Synthesized
gctcagaatactgttaataagttgcaggctcag

SEQ ID NO: 7100 - DNA, 33 bp, Artificial Sequence
  Synthesized
gctcagaatgttgctgatcgtgctgttgctcag

SEQ ID NO: 7101 - DNA, 33 bp, Artificial Sequence
  Synthesized
gctcagaatgtttttaatgctgctcctgctcag

SEQ ID NO: 7102 - DNA, 33 bp, Artificial Sequence
  Synthesized
gctcagaatgttggtcatgctgagttggctcag

SEQ ID NO: 7103 - DNA, 33 bp, Artificial Sequence
  Synthesized
gctcagaatgttggttcttcttctcgtgctcag

SEQ ID NO: 7104 - DNA, 33 bp, Artificial Sequence
  Synthesized
gctcagaatgttaaggatcgtactatggctcag

SEQ ID NO: 7105 - DNA, 33 bp, Artificial Sequence
  Synthesized
gctcagaatgttaagcaggctggtcctgctcag

SEQ ID NO: 7106 - DNA, 33 bp, Artificial Sequence
  Synthesized
gctcagaatgttaagtctggtactactgctcag

SEQ ID NO: 7107 - DNA, 33 bp, Artificial Sequence
  Synthesized
gctcagaatgttatgatgcgttctgaggctcag

SEQ ID NO: 7108 - DNA, 33 bp, Artificial Sequence
  Synthesized
gctcagaatgttatgcctcatcgttctgctcag

SEQ ID NO: 7109 - DNA, 33 bp, Artificial Sequence
  Synthesized
gctcagaatgttaatcgtacttctggtgctcag

SEQ ID NO: 7110 - DNA, 33 bp, Artificial Sequence
  Synthesized
gctcagaatgttcctactcgttctgctgctcag

SEQ ID NO: 7111 - DNA, 33 bp, Artificial Sequence
  Synthesized
gctcagaatgttcagattcctcagaaggctcag

SEQ ID NO: 7112 - DNA, 33 bp, Artificial Sequence
  Synthesized
gctcagaatgttcagcctcagactattgctcag

SEQ ID NO: 7113 - DNA, 33 bp, Artificial Sequence
  Synthesized
gctcagaatgttcgtaatgttttggatgctcag

SEQ ID NO: 7114 - DNA, 33 bp, Artificial Sequence
  Synthesized
gctcagaatgttcgtccttctaatgatgctcag

SEQ ID NO: 7115 - DNA, 33 bp, Artificial Sequence
  Synthesized
gctcagaatgttcgttctcagattcctgctcag

SEQ ID NO: 7116 - DNA, 33 bp, Artificial Sequence
  Synthesized
gctcagaatgtttctaagactatttctgctcag

SEQ ID NO: 7117 - DNA, 33 bp, Artificial Sequence
  Synthesized
gctcagaatgttactatgaatgttcgtgctcag

SEQ ID NO: 7118 - DNA, 33 bp, Artificial Sequence
  Synthesized
gctcagaatgttgttatgaaggcttctgctcag

SEQ ID NO: 7119 - DNA, 33 bp, Artificial Sequence
  Synthesized
gctcagaatgttgtttctggtcgtaatgctcag

SEQ ID NO: 7120 - DNA, 33 bp, Artificial Sequence
  Synthesized
gctcagaattatttgcctcatggtcatgctcag

SEQ ID NO: 7121 - DNA, 33 bp, Artificial Sequence
  Synthesized
gctcagaattatttgcctactcctcaggctcag

SEQ ID NO: 7122 - DNA, 33 bp, Artificial Sequence
  Synthesized
gctcagaattatcgtcattctgctatggctcag

SEQ ID NO: 7123 - DNA, 33 bp, Artificial Sequence
  Synthesized
gctcagaattatcgtcctaatatgcctgctcag

SEQ ID NO: 7124 - DNA, 33 bp, Artificial Sequence
  Synthesized
gctcagaattattctattggtgatcctgctcag

SEQ ID NO: 7125 - DNA, 33 bp, Artificial Sequence
  Synthesized
gctcagcctgctgctcagcgtcatactgctcag

SEQ ID NO: 7126 - DNA, 33 bp, Artificial Sequence
  Synthesized
gctcagcctgctgagtcttctgctatggctcag

SEQ ID NO: 7127 - DNA, 33 bp, Artificial Sequence
  Synthesized
gctcagcctgctggtcgtacttctttggctcag

SEQ ID NO: 7128 - DNA, 33 bp, Artificial Sequence
  Synthesized
gctcagcctgctaagactattactactgctcag

SEQ ID NO: 7129 - DNA, 33 bp, Artificial Sequence
  Synthesized
gctcagcctgctttgcctattcagtatgctcag

SEQ ID NO: 7130 - DNA, 33 bp, Artificial Sequence
  Synthesized
gctcagcctgctttgcctcgtggtcatgctcag

SEQ ID NO: 7131 - DNA, 33 bp, Artificial Sequence
  Synthesized
gctcagcctgctttgcctcgtggtaatgctcag

SEQ ID NO: 7132 - DNA, 33 bp, Artificial Sequence
  Synthesized
gctcagcctgctttgcctcgtttgcatgctcag

SEQ ID NO: 7133 - DNA, 33 bp, Artificial Sequence
  Synthesized
gctcagcctgctttgccttatcatggtgctcag

SEQ ID NO: 7134 - DNA, 33 bp, Artificial Sequence
  Synthesized
gctcagcctgctaatcattctatgaatgctcag

SEQ ID NO: 7135 - DNA, 33 bp, Artificial Sequence
  Synthesized
gctcagcctgctaattattctgctatggctcag

SEQ ID NO: 7136 - DNA, 33 bp, Artificial Sequence
  Synthesized
gctcagcctgctcctcctcgtggtaatgctcag

SEQ ID NO: 7137 - DNA, 33 bp, Artificial Sequence
  Synthesized
gctcagcctgctcagaagactatgcctgctcag

SEQ ID NO: 7138 - DNA, 33 bp, Artificial Sequence
  Synthesized
gctcagcctgctcagcgtcctcagatggctcag

SEQ ID NO: 7139 - DNA, 33 bp, Artificial Sequence
  Synthesized
gctcagcctgctcgtcattctgctatggctcag

SEQ ID NO: 7140 - DNA, 33 bp, Artificial Sequence
  Synthesized
gctcagcctgctgttgtttctgctatggctcag

SEQ ID NO: 7141 - DNA, 33 bp, Artificial Sequence
  Synthesized
gctcagcctgatgatgcttcttttatggctcag

SEQ ID NO: 7142 - DNA, 33 bp, Artificial Sequence
  Synthesized
gctcagcctgatttgcctcctttttttgctcag

SEQ ID NO: 7143 - DNA, 33 bp, Artificial Sequence
  Synthesized
gctcagcctgatcagaattcttttatggctcag

SEQ ID NO: 7144 - DNA, 33 bp, Artificial Sequence
  Synthesized
gctcagcctgatgttttttcttttatggctcag

SEQ ID NO: 7145 - DNA, 33 bp, Artificial Sequence
  Synthesized
gctcagcctgagttgcctatgggtggtgctcag

SEQ ID NO: 7146 - DNA, 33 bp, Artificial Sequence
  Synthesized
gctcagcctgagttgcctcgtttttatgctcag

SEQ ID NO: 7147 - DNA, 33 bp, Artificial Sequence
  Synthesized
gctcagcctgagaatcgtaatgtttctgctcag

SEQ ID NO: 7148 - DNA, 33 bp, Artificial Sequence
  Synthesized
gctcagcctgagcgtttgaagattgttgctcag

SEQ ID NO: 7149 - DNA, 33 bp, Artificial Sequence
  Synthesized
gctcagccttttggtactactgtttctgctcag

SEQ ID NO: 7150 - DNA, 33 bp, Artificial Sequence
  Synthesized
gctcagccttttaagggtgttggtggtgctcag

SEQ ID NO: 7151 - DNA, 33 bp, Artificial Sequence
  Synthesized
gctcagccttttaagccttcttttatggctcag

SEQ ID NO: 7152 - DNA, 33 bp, Artificial Sequence
  Synthesized
gctcagccttttttgccttttcagattgctcag

SEQ ID NO: 7153 - DNA, 33 bp, Artificial Sequence
  Synthesized
gctcagccttttttgcctcatactcctgctcag

SEQ ID NO: 7154 - DNA, 33 bp, Artificial Sequence
  Synthesized
gctcagccttttttgcctcgttatggtgctcag

SEQ ID NO: 7155 - DNA, 33 bp, Artificial Sequence
  Synthesized
gctcagcctggtgctccttctgctatggctcag

SEQ ID NO: 7156 - DNA, 33 bp, Artificial Sequence
  Synthesized
gctcagcctggtgctcgtggtgttggtgctcag

SEQ ID NO: 7157 - DNA, 33 bp, Artificial Sequence
  Synthesized
gctcagcctggtgctcgtttgcctactgctcag

SEQ ID NO: 7158 - DNA, 33 bp, Artificial Sequence
  Synthesized
gctcagcctggtgattctggtaagatggctcag

SEQ ID NO: 7159 - DNA, 33 bp, Artificial Sequence
  Synthesized
gctcagcctggtggtttgtcttttatggctcag

SEQ ID NO: 7160 - DNA, 33 bp, Artificial Sequence
  Synthesized
gctcagcctggtcataattcttttatggctcag

SEQ ID NO: 7161 - DNA, 33 bp, Artificial Sequence
  Synthesized
gctcagcctggtattcctggtggttctgctcag

SEQ ID NO: 7162 - DNA, 33 bp, Artificial Sequence
  Synthesized
gctcagcctggtattccttcttttatggctcag

SEQ ID NO: 7163 - DNA, 33 bp, Artificial Sequence
  Synthesized
gctcagcctggtaagcagtcttttaatgctcag

SEQ ID NO: 7164 - DNA, 33 bp, Artificial Sequence
  Synthesized
gctcagcctggtttgcctaagccttatgctcag

SEQ ID NO: 7165 - DNA, 33 bp, Artificial Sequence
  Synthesized
gctcagcctggtttgcctcgtggtcctgctcag

SEQ ID NO: 7166 - DNA, 33 bp, Artificial Sequence
  Synthesized
gctcagcctggtatgtctgctcgtactgctcag

SEQ ID NO: 7167 - DNA, 33 bp, Artificial Sequence
  Synthesized
gctcagcctggtcgtggtgttattggtgctcag

SEQ ID NO: 7168 - DNA, 33 bp, Artificial Sequence
  Synthesized
gctcagcctggtcgtaatggttctgctgctcag

SEQ ID NO: 7169 - DNA, 33 bp, Artificial Sequence
  Synthesized
gctcagcctggtcgtcagaatgctgaggctcag

SEQ ID NO: 7170 - DNA, 33 bp, Artificial Sequence
  Synthesized
gctcagcctggtactggttcttttatggctcag

SEQ ID NO: 7171 - DNA, 33 bp, Artificial Sequence
  Synthesized
gctcagcctggtgttggtaagcagcctgctcag

SEQ ID NO: 7172 - DNA, 33 bp, Artificial Sequence
  Synthesized
gctcagcctggtgttaatgctactcgtgctcag

SEQ ID NO: 7173 - DNA, 33 bp, Artificial Sequence
  Synthesized
gctcagcctcatggttctcagaatatggctcag

SEQ ID NO: 7174 - DNA, 33 bp, Artificial Sequence
  Synthesized
gctcagcctcatggtactcgtgttggtgctcag

SEQ ID NO: 7175 - DNA, 33 bp, Artificial Sequence
  Synthesized
gctcagcctcatcatgcttctaagattgctcag

SEQ ID NO: 7176 - DNA, 33 bp, Artificial Sequence
  Synthesized
gctcagcctcatcatttttctgctatggctcag

SEQ ID NO: 7177 - DNA, 33 bp, Artificial Sequence
  Synthesized
gctcagcctcatcatggttcttttatggctcag

SEQ ID NO: 7178 - DNA, 33 bp, Artificial Sequence
  Synthesized
gctcagcctcatcatatgtcttttatggctcag

SEQ ID NO: 7179 - DNA, 33 bp, Artificial Sequence
  Synthesized
gctcagcctcatcattcttcttttatggctcag

SEQ ID NO: 7180 - DNA, 33 bp, Artificial Sequence
  Synthesized
gctcagcctcataagaagtcttttatggctcag

SEQ ID NO: 7181 - DNA, 33 bp, Artificial Sequence
  Synthesized
gctcagcctcatttgccttttaagtatgctcag

SEQ ID NO: 7182 - DNA, 33 bp, Artificial Sequence
  Synthesized
gctcagcctcatttgcctaaggcttatgctcag

SEQ ID NO: 7183 - DNA, 33 bp, Artificial Sequence
  Synthesized
gctcagcctcatttgcctaagggtaaggctcag

SEQ ID NO: 7184 - DNA, 33 bp, Artificial Sequence
  Synthesized
gctcagcctcatttgcctcctaaggaggctcag

SEQ ID NO: 7185 - DNA, 33 bp, Artificial Sequence
  Synthesized
gctcagcctcatttgcctcgttttgctgctcag

SEQ ID NO: 7186 - DNA, 33 bp, Artificial Sequence
  Synthesized
gctcagcctcatttgcctcgtggtcctgctcag

SEQ ID NO: 7187 - DNA, 33 bp, Artificial Sequence
  Synthesized
gctcagcctcatttgcctcgtcatcgtgctcag

SEQ ID NO: 7188 - DNA, 33 bp, Artificial Sequence
  Synthesized
gctcagcctcatttgcctcgtatgaaggctcag

SEQ ID NO: 7189 - DNA, 33 bp, Artificial Sequence
  Synthesized
gctcagcctcatcgtcattctgctatggctcag

SEQ ID NO: 7190 - DNA, 33 bp, Artificial Sequence
  Synthesized
gctcagcctcatactgttaattctcatgctcag

SEQ ID NO: 7191 - DNA, 33 bp, Artificial Sequence
  Synthesized
gctcagcctattgctactggtaatgttgctcag

SEQ ID NO: 7192 - DNA, 33 bp, Artificial Sequence
  Synthesized
gctcagcctattgataagtctgctatggctcag

SEQ ID NO: 7193 - DNA, 33 bp, Artificial Sequence
  Synthesized
gctcagcctattggtatttcttttatggctcag

SEQ ID NO: 7194 - DNA, 33 bp, Artificial Sequence
  Synthesized
gctcagcctattttggatgataatcctgctcag

SEQ ID NO: 7195 - DNA, 33 bp, Artificial Sequence
  Synthesized
gctcagcctattttggatgataatcaggctcag

SEQ ID NO: 7196 - DNA, 33 bp, Artificial Sequence
  Synthesized
gctcagcctattttggatgataatactgctcag

SEQ ID NO: 7197 - DNA, 33 bp, Artificial Sequence
  Synthesized
gctcagcctattttgcctattcctcgtgctcag

SEQ ID NO: 7198 - DNA, 33 bp, Artificial Sequence
  Synthesized
gctcagcctaaggctccttcttttatggctcag

SEQ ID NO: 7199 - DNA, 33 bp, Artificial Sequence
  Synthesized
gctcagcctaagtttccttctgagtctgctcag

SEQ ID NO: 7200 - DNA, 33 bp, Artificial Sequence
  Synthesized
gctcagcctaagggtggtaatactcctgctcag

SEQ ID NO: 7201 - DNA, 33 bp, Artificial Sequence
  Synthesized
gctcagcctaagattcagtctgctttggctcag

SEQ ID NO: 7202 - DNA, 33 bp, Artificial Sequence
  Synthesized
gctcagcctaagttgcctcgtcgttttgctcag

SEQ ID NO: 7203 - DNA, 33 bp, Artificial Sequence
  Synthesized
gctcagcctaagcagggtaagcctgatgctcag

SEQ ID NO: 7204 - DNA, 33 bp, Artificial Sequence
  Synthesized
gctcagcctaagtctcgtgagtttactgctcag

SEQ ID NO: 7205 - DNA, 33 bp, Artificial Sequence
  Synthesized
gctcagcctaagactggtattttgggtgctcag

SEQ ID NO: 7206 - DNA, 33 bp, Artificial Sequence
  Synthesized
gctcagcctttggctaagaattctaatgctcag

SEQ ID NO: 7207 - DNA, 33 bp, Artificial Sequence
  Synthesized
gctcagcctttggcttctaattctgctgctcag

SEQ ID NO: 7208 - DNA, 33 bp, Artificial Sequence
  Synthesized
gctcagcctttggagcaggagcgtactgctcag

SEQ ID NO: 7209 - DNA, 33 bp, Artificial Sequence
  Synthesized
gctcagcctttgggtcgtactaatgctgctcag

SEQ ID NO: 7210 - DNA, 33 bp, Artificial Sequence
  Synthesized
gctcagcctttgttgcctcgtaagcgtgctcag

SEQ ID NO: 7211 - DNA, 33 bp, Artificial Sequence
  Synthesized
gctcagcctttgttgcctcgtatgcatgctcag

SEQ ID NO: 7212 - DNA, 33 bp, Artificial Sequence
  Synthesized
gctcagcctttgttgcctcgtcctcctgctcag

SEQ ID NO: 7213 - DNA, 33 bp, Artificial Sequence
  Synthesized
gctcagcctttgttgcagaatcctaaggctcag

SEQ ID NO: 7214 - DNA, 33 bp, Artificial Sequence
  Synthesized
gctcagcctttgcctgatgctgttcgtgctcag

SEQ ID NO: 7215 - DNA, 33 bp, Artificial Sequence
  Synthesized
gctcagcctttgcctaagtctcatgttgctcag

SEQ ID NO: 7216 - DNA, 33 bp, Artificial Sequence
  Synthesized
gctcagcctttgtctttgcgtgttgctgctcag

SEQ ID NO: 7217 - DNA, 33 bp, Artificial Sequence
  Synthesized
gctcagcctttgtctcgtactccttctgctcag

SEQ ID NO: 7218 - DNA, 33 bp, Artificial Sequence
  Synthesized
gctcagcctttgactggtcgtaatgaggctcag

SEQ ID NO: 7219 - DNA, 33 bp, Artificial Sequence
  Synthesized
gctcagcctttgacttctcctccttctgctcag

SEQ ID NO: 7220 - DNA, 33 bp, Artificial Sequence
  Synthesized
gctcagcctatggctttgtctgctatggctcag

SEQ ID NO: 7221 - DNA, 33 bp, Artificial Sequence
  Synthesized
gctcagcctatgaatcgtacttctatggctcag

SEQ ID NO: 7222 - DNA, 33 bp, Artificial Sequence
  Synthesized
gctcagcctatgcgtaatgattggcctgctcag

SEQ ID NO: 7223 - DNA, 33 bp, Artificial Sequence
  Synthesized
gctcagcctatgtctggtaaggagttggctcag

SEQ ID NO: 7224 - DNA, 33 bp, Artificial Sequence
  Synthesized
gctcagcctatgactaatcctatgcatgctcag

SEQ ID NO: 7225 - DNA, 33 bp, Artificial Sequence
  Synthesized
gctcagcctaatgctactcgtgctttggctcag

SEQ ID NO: 7226 - DNA, 33 bp, Artificial Sequence
  Synthesized
gctcagcctaattttactcgtgagcgtgctcag

SEQ ID NO: 7227 - DNA, 33 bp, Artificial Sequence
  Synthesized
gctcagcctaatggtactcgttttcatgctcag

SEQ ID NO: 7228 - DNA, 33 bp, Artificial Sequence
  Synthesized
gctcagcctaatggtactcgtcattatgctcag

SEQ ID NO: 7229 - DNA, 33 bp, Artificial Sequence
  Synthesized
gctcagcctaatggtactcgtcgtatggctcag

SEQ ID NO: 7230 - DNA, 33 bp, Artificial Sequence
  Synthesized
gctcagcctaatcatactcgttttcatgctcag

SEQ ID NO: 7231 - DNA, 33 bp, Artificial Sequence
  Synthesized
gctcagcctaatcatactcgtcatcctgctcag

SEQ ID NO: 7232 - DNA, 33 bp, Artificial Sequence
  Synthesized
gctcagcctaatcatactcgtcgtcctgctcag

SEQ ID NO: 7233 - DNA, 33 bp, Artificial Sequence
  Synthesized
gctcagcctaatattactcgtaataatgctcag

SEQ ID NO: 7234 - DNA, 33 bp, Artificial Sequence
  Synthesized
gctcagcctaataagactcgtgttcctgctcag

SEQ ID NO: 7235 - DNA, 33 bp, Artificial Sequence
  Synthesized
gctcagcctaatttggatgataatcctgctcag

SEQ ID NO: 7236 - DNA, 33 bp, Artificial Sequence
  Synthesized
gctcagcctaatttgttgcgtcatgatgctcag

SEQ ID NO: 7237 - DNA, 33 bp, Artificial Sequence
  Synthesized
gctcagcctaatttgactcgtgatggtgctcag

SEQ ID NO: 7238 - DNA, 33 bp, Artificial Sequence
  Synthesized
gctcagcctaatttgactcgtaagtttgctcag

SEQ ID NO: 7239 - DNA, 33 bp, Artificial Sequence
  Synthesized
gctcagcctaatatgactcgtccttttgctcag

SEQ ID NO: 7240 - DNA, 33 bp, Artificial Sequence
  Synthesized
gctcagcctaatatgactcgtcgtgatgctcag

SEQ ID NO: 7241 - DNA, 33 bp, Artificial Sequence
  Synthesized
gctcagcctaatatgactcgttattctgctcag

SEQ ID NO: 7242 - DNA, 33 bp, Artificial Sequence
  Synthesized
gctcagcctaataatcataataagcaggctcag

SEQ ID NO: 7243 - DNA, 33 bp, Artificial Sequence
  Synthesized
gctcagcctaataatcctttgcgtattgctcag

SEQ ID NO: 7244 - DNA, 33 bp, Artificial Sequence
  Synthesized
gctcagcctaataatactgagcctatggctcag

SEQ ID NO: 7245 - DNA, 33 bp, Artificial Sequence
  Synthesized
gctcagcctaataatactgagcgtggtgctcag

SEQ ID NO: 7246 - DNA, 33 bp, Artificial Sequence
  Synthesized
gctcagcctaataatacttttcctttggctcag

SEQ ID NO: 7247 - DNA, 33 bp, Artificial Sequence
  Synthesized
gctcagcctaataatacttttcgtaatgctcag

SEQ ID NO: 7248 - DNA, 33 bp, Artificial Sequence
  Synthesized
gctcagcctaataatactcatgtttttgctcag

SEQ ID NO: 7249 - DNA, 33 bp, Artificial Sequence
  Synthesized
gctcagcctaataatactaaggttatggctcag

SEQ ID NO: 7250 - DNA, 33 bp, Artificial Sequence
  Synthesized
gctcagcctaataatactaatgctcaggctcag

SEQ ID NO: 7251 - DNA, 33 bp, Artificial Sequence
  Synthesized
gctcagcctaataatactccttttggtgctcag

SEQ ID NO: 7252 - DNA, 33 bp, Artificial Sequence
  Synthesized
gctcagcctaataatactcctattaaggctcag

SEQ ID NO: 7253 - DNA, 33 bp, Artificial Sequence
  Synthesized
gctcagcctaataatactcctccttctgctcag

SEQ ID NO: 7254 - DNA, 33 bp, Artificial Sequence
  Synthesized
gctcagcctaataatactcctcgtactgctcag

SEQ ID NO: 7255 - DNA, 33 bp, Artificial Sequence
  Synthesized
gctcagcctaataatactcgtatgaatgctcag

SEQ ID NO: 7256 - DNA, 33 bp, Artificial Sequence
  Synthesized
gctcagcctaataatactactggtcaggctcag

SEQ ID NO: 7257 - DNA, 33 bp, Artificial Sequence
  Synthesized
gctcagcctaataatacttatgctatggctcag

SEQ ID NO: 7258 - DNA, 33 bp, Artificial Sequence
  Synthesized
gctcagcctaataatacttataagaaggctcag

SEQ ID NO: 7259 - DNA, 33 bp, Artificial Sequence
  Synthesized
gctcagcctaatcctgctcatgattctgctcag

SEQ ID NO: 7260 - DNA, 33 bp, Artificial Sequence
  Synthesized
gctcagcctaatcctgagcatttttctgctcag

SEQ ID NO: 7261 - DNA, 33 bp, Artificial Sequence
  Synthesized
gctcagcctaatcctttttttcattctgctcag

SEQ ID NO: 7262 - DNA, 33 bp, Artificial Sequence
  Synthesized
gctcagcctaatccttttaagggttctgctcag

SEQ ID NO: 7263 - DNA, 33 bp, Artificial Sequence
  Synthesized
gctcagcctaatccttttttgtattctgctcag

SEQ ID NO: 7264 - DNA, 33 bp, Artificial Sequence
  Synthesized
gctcagcctaatcctggttttacttctgctcag

SEQ ID NO: 7265 - DNA, 33 bp, Artificial Sequence
  Synthesized
gctcagcctaatcctcatactttgtctgctcag

SEQ ID NO: 7266 - DNA, 33 bp, Artificial Sequence
  Synthesized
gctcagcctaatcctattcgtttttctgctcag

SEQ ID NO: 7267 - DNA, 33 bp, Artificial Sequence
  Synthesized
gctcagcctaatcctaagggttattctgctcag

SEQ ID NO: 7268 - DNA, 33 bp, Artificial Sequence
  Synthesized
gctcagcctaatcctaagtcttattctgctcag

SEQ ID NO: 7269 - DNA, 33 bp, Artificial Sequence
  Synthesized
gctcagcctaatcctttgggtggttctgctcag

SEQ ID NO: 7270 - DNA, 33 bp, Artificial Sequence
  Synthesized
gctcagcctaatcctcctcctggttctgctcag

SEQ ID NO: 7271 - DNA, 33 bp, Artificial Sequence
  Synthesized
gctcagcctaatcctccttatggttctgctcag

SEQ ID NO: 7272 - DNA, 33 bp, Artificial Sequence
  Synthesized
gctcagcctaatcctactcgtcctcatgctcag

SEQ ID NO: 7273 - DNA, 33 bp, Artificial Sequence
  Synthesized
gctcagcctaatcctacttatggttctgctcag

SEQ ID NO: 7274 - DNA, 33 bp, Artificial Sequence
  Synthesized
gctcagcctaatcctgtttttcgttctgctcag

SEQ ID NO: 7275 - DNA, 33 bp, Artificial Sequence
  Synthesized
gctcagcctaatcctgttggtcgttctgctcag

SEQ ID NO: 7276 - DNA, 33 bp, Artificial Sequence
  Synthesized
gctcagcctaatcctgttattcgttctgctcag

SEQ ID NO: 7277 - DNA, 33 bp, Artificial Sequence
  Synthesized
gctcagcctaatcctgttaagcgttctgctcag

SEQ ID NO: 7278 - DNA, 33 bp, Artificial Sequence
  Synthesized
gctcagcctaatcctgttaatcgttctgctcag

SEQ ID NO: 7279 - DNA, 33 bp, Artificial Sequence
  Synthesized
gctcagcctaatccttatcatgtttctgctcag

SEQ ID NO: 7280 - DNA, 33 bp, Artificial Sequence
  Synthesized
gctcagcctaatcgtttggctggtaatgctcag

SEQ ID NO: 7281 - DNA, 33 bp, Artificial Sequence
  Synthesized
gctcagcctaatcgtactcgtgttactgctcag

SEQ ID NO: 7282 - DNA, 33 bp, Artificial Sequence
  Synthesized
gctcagcctaattctactaagtcttttgctcag

SEQ ID NO: 7283 - DNA, 33 bp, Artificial Sequence
  Synthesized
gctcagcctaattctactcgtcgtatggctcag

SEQ ID NO: 7284 - DNA, 33 bp, Artificial Sequence
  Synthesized
gctcagcctaatactactcgtgctcatgctcag

SEQ ID NO: 7285 - DNA, 33 bp, Artificial Sequence
  Synthesized
gctcagcctaatactactcgtggtcatgctcag

SEQ ID NO: 7286 - DNA, 33 bp, Artificial Sequence
  Synthesized
gctcagcctaatactactcgttctactgctcag

SEQ ID NO: 7287 - DNA, 33 bp, Artificial Sequence
  Synthesized
gctcagcctaatgttatgtctgctatggctcag

SEQ ID NO: 7288 - DNA, 33 bp, Artificial Sequence
  Synthesized
gctcagcctaatgttactcgtggttttgctcag

SEQ ID NO: 7289 - DNA, 33 bp, Artificial Sequence
  Synthesized
gctcagcctaatgttactcgtcatttggctcag

SEQ ID NO: 7290 - DNA, 33 bp, Artificial Sequence
  Synthesized
gctcagcctaatgttactcgtcattctgctcag

SEQ ID NO: 7291 - DNA, 33 bp, Artificial Sequence
  Synthesized
gctcagcctaatgttactcgtcgtggtgctcag

SEQ ID NO: 7292 - DNA, 33 bp, Artificial Sequence
  Synthesized
gctcagcctaattatactcgttctcatgctcag

SEQ ID NO: 7293 - DNA, 33 bp, Artificial Sequence
  Synthesized
gctcagcctaattatactcgttctattgctcag

SEQ ID NO: 7294 - DNA, 33 bp, Artificial Sequence
  Synthesized
gctcagcctcctgatatttctgctatggctcag

SEQ ID NO: 7295 - DNA, 33 bp, Artificial Sequence
  Synthesized
gctcagcctcctcatttttctgctatggctcag

SEQ ID NO: 7296 - DNA, 33 bp, Artificial Sequence
  Synthesized
gctcagcctcctttgatgactcaggatgctcag

SEQ ID NO: 7297 - DNA, 33 bp, Artificial Sequence
  Synthesized
gctcagcctcctttgcctattcctcctgctcag

SEQ ID NO: 7298 - DNA, 33 bp, Artificial Sequence
  Synthesized
gctcagcctcctttgcctattgttaatgctcag

SEQ ID NO: 7299 - DNA, 33 bp, Artificial Sequence
  Synthesized
gctcagcctcctttgcctatggagggtgctcag

SEQ ID NO: 7300 - DNA, 33 bp, Artificial Sequence
  Synthesized
gctcagcctcctttgcctatgcatgttgctcag

SEQ ID NO: 7301 - DNA, 33 bp, Artificial Sequence
  Synthesized
gctcagcctcctttgcctcgtgttcctgctcag

SEQ ID NO: 7302 - DNA, 33 bp, Artificial Sequence
  Synthesized
gctcagcctcctactgttgttactcgtgctcag

SEQ ID NO: 7303 - DNA, 33 bp, Artificial Sequence
  Synthesized
gctcagcctcctgttggttctgctatggctcag

SEQ ID NO: 7304 - DNA, 33 bp, Artificial Sequence
  Synthesized
gctcagcctccttatttttctgctatggctcag

SEQ ID NO: 7305 - DNA, 33 bp, Artificial Sequence
  Synthesized
gctcagcctccttataagtcttttatggctcag

SEQ ID NO: 7306 - DNA, 33 bp, Artificial Sequence
  Synthesized
gctcagcctcaggctaatattggtgttgctcag

SEQ ID NO: 7307 - DNA, 33 bp, Artificial Sequence
  Synthesized
gctcagcctcagttgcctatgtttgttgctcag

SEQ ID NO: 7308 - DNA, 33 bp, Artificial Sequence
  Synthesized
gctcagcctcagcctaataatcagaaggctcag

SEQ ID NO: 7309 - DNA, 33 bp, Artificial Sequence
  Synthesized
gctcagcctcagtctaagaatttttctgctcag

SEQ ID NO: 7310 - DNA, 33 bp, Artificial Sequence
  Synthesized
gctcagcctcagactcgtgttgatcgtgctcag

SEQ ID NO: 7311 - DNA, 33 bp, Artificial Sequence
  Synthesized
gctcagcctcgtgctaatgttacttctgctcag

SEQ ID NO: 7312 - DNA, 33 bp, Artificial Sequence
  Synthesized
gctcagcctcgtgcttctcagtcttctgctcag

SEQ ID NO: 7313 - DNA, 33 bp, Artificial Sequence
  Synthesized
gctcagcctcgtgagaagatgtctattgctcag

SEQ ID NO: 7314 - DNA, 33 bp, Artificial Sequence
  Synthesized
gctcagcctcgtgagcgtacttatattgctcag

SEQ ID NO: 7315 - DNA, 33 bp, Artificial Sequence
  Synthesized
gctcagcctcgttttcattcttttatggctcag

SEQ ID NO: 7316 - DNA, 33 bp, Artificial Sequence
  Synthesized
gctcagcctcgtttgcctgagtttcaggctcag

SEQ ID NO: 7317 - DNA, 33 bp, Artificial Sequence
  Synthesized
gctcagcctcgtaattctgagacttctgctcag

SEQ ID NO: 7318 - DNA, 33 bp, Artificial Sequence
  Synthesized
gctcagcctcgtcctactgctgctcctgctcag

SEQ ID NO: 7319 - DNA, 33 bp, Artificial Sequence
  Synthesized
gctcagcctcgtcgtaagtctgctatggctcag

SEQ ID NO: 7320 - DNA, 33 bp, Artificial Sequence
  Synthesized
gctcagcctcgtcgtttgtctgctatggctcag

SEQ ID NO: 7321 - DNA, 33 bp, Artificial Sequence
  Synthesized
gctcagcctcgttctaagtcttttatggctcag

SEQ ID NO: 7322 - DNA, 33 bp, Artificial Sequence
  Synthesized
gctcagccttctgctcagactttgaaggctcag

SEQ ID NO: 7323 - DNA, 33 bp, Artificial Sequence
  Synthesized
gctcagccttctgctcgttctttgggtgctcag

SEQ ID NO: 7324 - DNA, 33 bp, Artificial Sequence
  Synthesized
gctcagccttctgattctcatcgtcctgctcag

SEQ ID NO: 7325 - DNA, 33 bp, Artificial Sequence
  Synthesized
gctcagccttcttttaagtcttttatggctcag

SEQ ID NO: 7326 - DNA, 33 bp, Artificial Sequence
  Synthesized
gctcagccttctggtggttcttttatggctcag

SEQ ID NO: 7327 - DNA, 33 bp, Artificial Sequence
  Synthesized
gctcagccttctaaggataatcgtattgctcag

SEQ ID NO: 7328 - DNA, 33 bp, Artificial Sequence
  Synthesized
gctcagccttctttgcctcgttttcatgctcag

SEQ ID NO: 7329 - DNA, 33 bp, Artificial Sequence
  Synthesized
gctcagccttctttgcctcgtccttatgctcag

SEQ ID NO: 7330 - DNA, 33 bp, Artificial Sequence
  Synthesized
gctcagccttctttgccttctattactgctcag

SEQ ID NO: 7331 - DNA, 33 bp, Artificial Sequence
  Synthesized
gctcagccttctcctgctcctcatgctgctcag

SEQ ID NO: 7332 - DNA, 33 bp, Artificial Sequence
  Synthesized
gctcagccttctcctcagactaagttggctcag

SEQ ID NO: 7333 - DNA, 33 bp, Artificial Sequence
  Synthesized
gctcagccttctcgtgctcctcatgttgctcag

SEQ ID NO: 7334 - DNA, 33 bp, Artificial Sequence
  Synthesized
gctcagccttctcgtgattgggctgctgctcag

SEQ ID NO: 7335 - DNA, 33 bp, Artificial Sequence
  Synthesized
gctcagccttctcgtggtcagactactgctcag

SEQ ID NO: 7336 - DNA, 33 bp, Artificial Sequence
  Synthesized
gctcagccttctcgtcaggatcctcatgctcag

SEQ ID NO: 7337 - DNA, 33 bp, Artificial Sequence
  Synthesized
gctcagccttctcgtactgttggtactgctcag

SEQ ID NO: 7338 - DNA, 33 bp, Artificial Sequence
  Synthesized
gctcagccttcttctcattcttatggtgctcag

SEQ ID NO: 7339 - DNA, 33 bp, Artificial Sequence
  Synthesized
gctcagccttcttcttctattcgtaatgctcag

SEQ ID NO: 7340 - DNA, 33 bp, Artificial Sequence
  Synthesized
gctcagccttctactactggtaagactgctcag

SEQ ID NO: 7341 - DNA, 33 bp, Artificial Sequence
  Synthesized
gctcagccttctgttaatactactaaggctcag

SEQ ID NO: 7342 - DNA, 33 bp, Artificial Sequence
  Synthesized
gctcagccttctgtttctactcctcgtgctcag

SEQ ID NO: 7343 - DNA, 33 bp, Artificial Sequence
  Synthesized
gctcagcctactgctaagtcttctatggctcag

SEQ ID NO: 7344 - DNA, 33 bp, Artificial Sequence
  Synthesized
gctcagcctactgatcagtctcgttatgctcag

SEQ ID NO: 7345 - DNA, 33 bp, Artificial Sequence
  Synthesized
gctcagcctactgatcgtgttaattttgctcag

SEQ ID NO: 7346 - DNA, 33 bp, Artificial Sequence
  Synthesized
gctcagcctactggtcatcctcgttctgctcag

SEQ ID NO: 7347 - DNA, 33 bp, Artificial Sequence
  Synthesized
gctcagcctactattaagtcttctatggctcag

SEQ ID NO: 7348 - DNA, 33 bp, Artificial Sequence
  Synthesized
gctcagcctactattcctcgtgctggtgctcag

SEQ ID NO: 7349 - DNA, 33 bp, Artificial Sequence
  Synthesized
gctcagcctactatttctcaggttcctgctcag

SEQ ID NO: 7350 - DNA, 33 bp, Artificial Sequence
  Synthesized
gctcagcctactaagattactaattctgctcag

SEQ ID NO: 7351 - DNA, 33 bp, Artificial Sequence
  Synthesized
gctcagcctactaagtctactacttctgctcag

SEQ ID NO: 7352 - DNA, 33 bp, Artificial Sequence
  Synthesized
gctcagcctactttgcctaatattcgtgctcag

SEQ ID NO: 7353 - DNA, 33 bp, Artificial Sequence
  Synthesized
gctcagcctactttgcaggttccttctgctcag

SEQ ID NO: 7354 - DNA, 33 bp, Artificial Sequence
  Synthesized
gctcagcctactccttattcttttatggctcag

SEQ ID NO: 7355 - DNA, 33 bp, Artificial Sequence
  Synthesized
gctcagcctactcgtcagttgactgatgctcag

SEQ ID NO: 7356 - DNA, 33 bp, Artificial Sequence
  Synthesized
gctcagcctactcgtcagtcttttatggctcag

SEQ ID NO: 7357 - DNA, 33 bp, Artificial Sequence
  Synthesized
gctcagcctacttctaagatggctttggctcag

SEQ ID NO: 7358 - DNA, 33 bp, Artificial Sequence
  Synthesized
gctcagcctactgttactaatactaaggctcag

SEQ ID NO: 7359 - DNA, 33 bp, Artificial Sequence
  Synthesized
gctcagcctgttgctgctactacttctgctcag

SEQ ID NO: 7360 - DNA, 33 bp, Artificial Sequence
  Synthesized
gctcagcctgttggtttggttaagtctgctcag

SEQ ID NO: 7361 - DNA, 33 bp, Artificial Sequence
  Synthesized
gctcagcctgttggtcgttcttctaatgctcag

SEQ ID NO: 7362 - DNA, 33 bp, Artificial Sequence
  Synthesized
gctcagcctgttcatactaagatgattgctcag

SEQ ID NO: 7363 - DNA, 33 bp, Artificial Sequence
  Synthesized
gctcagcctgttaagggtaatgatgctgctcag

SEQ ID NO: 7364 - DNA, 33 bp, Artificial Sequence
  Synthesized
gctcagcctgttttgcctcagcctggtgctcag

SEQ ID NO: 7365 - DNA, 33 bp, Artificial Sequence
  Synthesized
gctcagcctgttaataataagttgcaggctcag

SEQ ID NO: 7366 - DNA, 33 bp, Artificial Sequence
  Synthesized
gctcagcctgtttctaagatttctgttgctcag

SEQ ID NO: 7367 - DNA, 33 bp, Artificial Sequence
  Synthesized
gctcagcctgtttctaagcagtcttatgctcag

SEQ ID NO: 7368 - DNA, 33 bp, Artificial Sequence
  Synthesized
gctcagcctgttgtttctggtcagactgctcag

SEQ ID NO: 7369 - DNA, 33 bp, Artificial Sequence
  Synthesized
gctcagccttggggtaagcagtttttggctcag

SEQ ID NO: 7370 - DNA, 33 bp, Artificial Sequence
  Synthesized
gctcagccttatttgcctcgtggtaatgctcag

SEQ ID NO: 7371 - DNA, 33 bp, Artificial Sequence
  Synthesized
gctcagccttatcgtcattcttttatggctcag

SEQ ID NO: 7372 - DNA, 33 bp, Artificial Sequence
  Synthesized
gctcagccttattctaatcgtgagttggctcag

SEQ ID NO: 7373 - DNA, 33 bp, Artificial Sequence
  Synthesized
gctcagcaggctggtcgttctgttgctgctcag

SEQ ID NO: 7374 - DNA, 33 bp, Artificial Sequence
  Synthesized
gctcagcaggctggtgttactgttcgtgctcag

SEQ ID NO: 7375 - DNA, 33 bp, Artificial Sequence
  Synthesized
gctcagcaggctcgtactactaatttggctcag

SEQ ID NO: 7376 - DNA, 33 bp, Artificial Sequence
  Synthesized
gctcagcaggcttatcctgagcctaatgctcag

SEQ ID NO: 7377 - DNA, 33 bp, Artificial Sequence
  Synthesized
gctcagcaggcttatacttctacttctgctcag

SEQ ID NO: 7378 - DNA, 33 bp, Artificial Sequence
  Synthesized
gctcagcaggatttgcctaagcctgctgctcag

SEQ ID NO: 7379 - DNA, 33 bp, Artificial Sequence
  Synthesized
gctcagcaggattcttctgcttataaggctcag

SEQ ID NO: 7380 - DNA, 33 bp, Artificial Sequence
  Synthesized
gctcagcaggatacttctcatcctaaggctcag

SEQ ID NO: 7381 - DNA, 33 bp, Artificial Sequence
  Synthesized
gctcagcaggagcagcatcgtcatactgctcag

SEQ ID NO: 7382 - DNA, 33 bp, Artificial Sequence
  Synthesized
gctcagcaggagactcgtgttcatcaggctcag

SEQ ID NO: 7383 - DNA, 33 bp, Artificial Sequence
  Synthesized
gctcagcaggaggttccttcttttatggctcag

SEQ ID NO: 7384 - DNA, 33 bp, Artificial Sequence
  Synthesized
gctcagcagttttcttctacttctgctgctcag

SEQ ID NO: 7385 - DNA, 33 bp, Artificial Sequence
  Synthesized
gctcagcagggtgcttctttgcgtgttgctcag

SEQ ID NO: 7386 - DNA, 33 bp, Artificial Sequence
  Synthesized
gctcagcagggtcataatgctaattctgctcag

SEQ ID NO: 7387 - DNA, 33 bp, Artificial Sequence
  Synthesized
gctcagcagggtaagttgtcttcttctgctcag

SEQ ID NO: 7388 - DNA, 33 bp, Artificial Sequence
  Synthesized
gctcagcagggtttgaaggctattcaggctcag

SEQ ID NO: 7389 - DNA, 33 bp, Artificial Sequence
  Synthesized
gctcagcagggtttgcctcgtcatactgctcag

SEQ ID NO: 7390 - DNA, 33 bp, Artificial Sequence
  Synthesized
gctcagcagggtttgcctcgtaaggctgctcag

SEQ ID NO: 7391 - DNA, 33 bp, Artificial Sequence
  Synthesized
gctcagcagggtaattatgctggtcgtgctcag

SEQ ID NO: 7392 - DNA, 33 bp, Artificial Sequence
  Synthesized
gctcagcagggtcgttcttctatgactgctcag

SEQ ID NO: 7393 - DNA, 33 bp, Artificial Sequence
  Synthesized
gctcagcagggttctgctatgactggtgctcag

SEQ ID NO: 7394 - DNA, 33 bp, Artificial Sequence
  Synthesized
gctcagcagggttctttgcagcgttctgctcag

SEQ ID NO: 7395 - DNA, 33 bp, Artificial Sequence
  Synthesized
gctcagcagcatcatttgaataagtctgctcag

SEQ ID NO: 7396 - DNA, 33 bp, Artificial Sequence
  Synthesized
gctcagcagcatttgcctcgttataaggctcag

SEQ ID NO: 7397 - DNA, 33 bp, Artificial Sequence
  Synthesized
gctcagcagcataataatattgcttttgctcag

SEQ ID NO: 7398 - DNA, 33 bp, Artificial Sequence
  Synthesized
gctcagcagcataatcgtactattcctgctcag

SEQ ID NO: 7399 - DNA, 33 bp, Artificial Sequence
  Synthesized
gctcagcagcattctactggtactggtgctcag

SEQ ID NO: 7400 - DNA, 33 bp, Artificial Sequence
  Synthesized
gctcagcagcatacttctcctgtttctgctcag

SEQ ID NO: 7401 - DNA, 33 bp, Artificial Sequence
  Synthesized
gctcagcagattgcttctcgtttggatgctcag

SEQ ID NO: 7402 - DNA, 33 bp, Artificial Sequence
  Synthesized
gctcagcagattggtcgttcttctaatgctcag

SEQ ID NO: 7403 - DNA, 33 bp, Artificial Sequence
  Synthesized
gctcagcagattcatggtcgtgatgttgctcag

SEQ ID NO: 7404 - DNA, 33 bp, Artificial Sequence
  Synthesized
gctcagcagattaagcagactactcatgctcag

SEQ ID NO: 7405 - DNA, 33 bp, Artificial Sequence
  Synthesized
gctcagcagattttggatgataatcctgctcag

SEQ ID NO: 7406 - DNA, 33 bp, Artificial Sequence
  Synthesized
gctcagcagattttgtctgcttctcctgctcag

SEQ ID NO: 7407 - DNA, 33 bp, Artificial Sequence
  Synthesized
gctcagcagatttctggtgctatgaaggctcag

SEQ ID NO: 7408 - DNA, 33 bp, Artificial Sequence
  Synthesized
gctcagcagatttctaaggttggtcctgctcag

SEQ ID NO: 7409 - DNA, 33 bp, Artificial Sequence
  Synthesized
gctcagcagaaggataattctatgactgctcag

SEQ ID NO: 7410 - DNA, 33 bp, Artificial Sequence
  Synthesized
gctcagcagaagcatccttcttttatggctcag

SEQ ID NO: 7411 - DNA, 33 bp, Artificial Sequence
  Synthesized
gctcagcagaagttggattctgctattgctcag

SEQ ID NO: 7412 - DNA, 33 bp, Artificial Sequence
  Synthesized
gctcagcagaagttgcctaaggagttggctcag

SEQ ID NO: 7413 - DNA, 33 bp, Artificial Sequence
  Synthesized
gctcagcagaagttgactactaatcctgctcag

SEQ ID NO: 7414 - DNA, 33 bp, Artificial Sequence
  Synthesized
gctcagcagaagatgacttctactactgctcag

SEQ ID NO: 7415 - DNA, 33 bp, Artificial Sequence
  Synthesized
gctcagcagaagaatttgcctacttttgctcag

SEQ ID NO: 7416 - DNA, 33 bp, Artificial Sequence
  Synthesized
gctcagcagaagaatactccttctttggctcag

SEQ ID NO: 7417 - DNA, 33 bp, Artificial Sequence
  Synthesized
gctcagcagaagccttctactatggttgctcag

SEQ ID NO: 7418 - DNA, 33 bp, Artificial Sequence
  Synthesized
gctcagcagaagcaggctatgattcctgctcag

SEQ ID NO: 7419 - DNA, 33 bp, Artificial Sequence
  Synthesized
gctcagcagaagtctgcttctgttatggctcag

SEQ ID NO: 7420 - DNA, 33 bp, Artificial Sequence
  Synthesized
gctcagcagaagactcagactgttgttgctcag

SEQ ID NO: 7421 - DNA, 33 bp, Artificial Sequence
  Synthesized
gctcagcagaagactcgtattatggaggctcag

SEQ ID NO: 7422 - DNA, 33 bp, Artificial Sequence
  Synthesized
gctcagcagttggctcgtaattctaatgctcag

SEQ ID NO: 7423 - DNA, 33 bp, Artificial Sequence
  Synthesized
gctcagcagttgcatcattctgctatggctcag

SEQ ID NO: 7424 - DNA, 33 bp, Artificial Sequence
  Synthesized
gctcagcagttgcataaggctgataaggctcag

SEQ ID NO: 7425 - DNA, 33 bp, Artificial Sequence
  Synthesized
gctcagcagttgaaggctggtggtcaggctcag

SEQ ID NO: 7426 - DNA, 33 bp, Artificial Sequence
  Synthesized
gctcagcagttgaagggtactggtcctgctcag

SEQ ID NO: 7427 - DNA, 33 bp, Artificial Sequence
  Synthesized
gctcagcagttgaagaattataatggtgctcag

SEQ ID NO: 7428 - DNA, 33 bp, Artificial Sequence
  Synthesized
gctcagcagttgttgcctcgtcattttgctcag

SEQ ID NO: 7429 - DNA, 33 bp, Artificial Sequence
  Synthesized
gctcagcagttgttgcctcgtactgttgctcag

SEQ ID NO: 7430 - DNA, 33 bp, Artificial Sequence
  Synthesized
gctcagcagttgttgcgtgataattctgctcag

SEQ ID NO: 7431 - DNA, 33 bp, Artificial Sequence
  Synthesized
gctcagcagttgcctcgttctcagactgctcag

SEQ ID NO: 7432 - DNA, 33 bp, Artificial Sequence
  Synthesized
gctcagcagttgccttctgctatgtctgctcag

SEQ ID NO: 7433 - DNA, 33 bp, Artificial Sequence
  Synthesized
gctcagcagttgcgtactcctactactgctcag

SEQ ID NO: 7434 - DNA, 33 bp, Artificial Sequence
  Synthesized
gctcagcagttgcgtactcgtgaggatgctcag

SEQ ID NO: 7435 - DNA, 33 bp, Artificial Sequence
  Synthesized
gctcagcagttgtctggttttaaggctgctcag

SEQ ID NO: 7436 - DNA, 33 bp, Artificial Sequence
  Synthesized
gctcagcagttgacttctgttcctaaggctcag

SEQ ID NO: 7437 - DNA, 33 bp, Artificial Sequence
  Synthesized
gctcagcagttggttcctaatcgttctgctcag

SEQ ID NO: 7438 - DNA, 33 bp, Artificial Sequence
  Synthesized
gctcagcagttggttcagcatcgtgatgctcag

SEQ ID NO: 7439 - DNA, 33 bp, Artificial Sequence
  Synthesized
gctcagcagatgggtggtttgtctgttgctcag

SEQ ID NO: 7440 - DNA, 33 bp, Artificial Sequence
  Synthesized
gctcagcagatgcctgcttataagtctgctcag

SEQ ID NO: 7441 - DNA, 33 bp, Artificial Sequence
  Synthesized
gctcagcagatgtctgctcctatggctgctcag

SEQ ID NO: 7442 - DNA, 33 bp, Artificial Sequence
  Synthesized
gctcagcagatgtctacttctcgtttggctcag

SEQ ID NO: 7443 - DNA, 33 bp, Artificial Sequence
  Synthesized
gctcagcagaatgctactaagatggttgctcag

SEQ ID NO: 7444 - DNA, 33 bp, Artificial Sequence
  Synthesized
gctcagcagaatgagatgttggttggtgctcag

SEQ ID NO: 7445 - DNA, 33 bp, Artificial Sequence
  Synthesized
gctcagcagaatggtttggtttctaatgctcag

SEQ ID NO: 7446 - DNA, 33 bp, Artificial Sequence
  Synthesized
gctcagcagaatggtactcgtggtcgtgctcag

SEQ ID NO: 7447 - DNA, 33 bp, Artificial Sequence
  Synthesized
gctcagcagaatcatcagtctaatgctgctcag

SEQ ID NO: 7448 - DNA, 33 bp, Artificial Sequence
  Synthesized
gctcagcagaataagactcgtccttttgctcag

SEQ ID NO: 7449 - DNA, 33 bp, Artificial Sequence
  Synthesized
gctcagcagaatatgcagactgctaatgctcag

SEQ ID NO: 7450 - DNA, 33 bp, Artificial Sequence
  Synthesized
gctcagcagaataatactcatatgcctgctcag

SEQ ID NO: 7451 - DNA, 33 bp, Artificial Sequence
  Synthesized
gctcagcagaataatactcctatgcctgctcag

SEQ ID NO: 7452 - DNA, 33 bp, Artificial Sequence
  Synthesized
gctcagcagaataatactactattcctgctcag

SEQ ID NO: 7453 - DNA, 33 bp, Artificial Sequence
  Synthesized
gctcagcagaatccttttttgccttctgctcag

SEQ ID NO: 7454 - DNA, 33 bp, Artificial Sequence
  Synthesized
gctcagcagaatcctcattatatttctgctcag

SEQ ID NO: 7455 - DNA, 33 bp, Artificial Sequence
  Synthesized
gctcagcagaatcctactcgtggtgttgctcag

SEQ ID NO: 7456 - DNA, 33 bp, Artificial Sequence
  Synthesized
gctcagcagaatcctgttaagcgttctgctcag

SEQ ID NO: 7457 - DNA, 33 bp, Artificial Sequence
  Synthesized
gctcagcagaatcctgttcctcgttctgctcag

SEQ ID NO: 7458 - DNA, 33 bp, Artificial Sequence
  Synthesized
gctcagcagaatcagtctgagatgaatgctcag

SEQ ID NO: 7459 - DNA, 33 bp, Artificial Sequence
  Synthesized
gctcagcagaatcgtactcgtcctggtgctcag

SEQ ID NO: 7460 - DNA, 33 bp, Artificial Sequence
  Synthesized
gctcagcagaatcgtactcgtcagtttgctcag

SEQ ID NO: 7461 - DNA, 33 bp, Artificial Sequence
  Synthesized
gctcagcagaattctactcgttctttggctcag

SEQ ID NO: 7462 - DNA, 33 bp, Artificial Sequence
  Synthesized
gctcagcagaatactgtttctcgttctgctcag

SEQ ID NO: 7463 - DNA, 33 bp, Artificial Sequence
  Synthesized
gctcagcagaatgttcctactcgtgctgctcag

SEQ ID NO: 7464 - DNA, 33 bp, Artificial Sequence
  Synthesized
gctcagcagaatgttcgtatgtcttctgctcag

SEQ ID NO: 7465 - DNA, 33 bp, Artificial Sequence
  Synthesized
gctcagcagaattatactcgtggtcaggctcag

SEQ ID NO: 7466 - DNA, 33 bp, Artificial Sequence
  Synthesized
gctcagcagaattatactcgtccttatgctcag

SEQ ID NO: 7467 - DNA, 33 bp, Artificial Sequence
  Synthesized
gctcagcagcctgcttttgctgttaaggctcag

SEQ ID NO: 7468 - DNA, 33 bp, Artificial Sequence
  Synthesized
gctcagcagcctggtcgtactattttggctcag

SEQ ID NO: 7469 - DNA, 33 bp, Artificial Sequence
  Synthesized
gctcagcagcctttgcctcgttttggtgctcag

SEQ ID NO: 7470 - DNA, 33 bp, Artificial Sequence
  Synthesized
gctcagcagcctttgcctcgtcctcgtgctcag

SEQ ID NO: 7471 - DNA, 33 bp, Artificial Sequence
  Synthesized
gctcagcagcctcctaagcctattcaggctcag

SEQ ID NO: 7472 - DNA, 33 bp, Artificial Sequence
  Synthesized
gctcagcagccttctttgaatgctactgctcag

SEQ ID NO: 7473 - DNA, 33 bp, Artificial Sequence
  Synthesized
gctcagcagccttctaatactcctgctgctcag

SEQ ID NO: 7474 - DNA, 33 bp, Artificial Sequence
  Synthesized
gctcagcagcagcataattcttttatggctcag

SEQ ID NO: 7475 - DNA, 33 bp, Artificial Sequence
  Synthesized
gctcagcagcagttgcctaattatcctgctcag

SEQ ID NO: 7476 - DNA, 33 bp, Artificial Sequence
  Synthesized
gctcagcagcagccttcttctttgatggctcag

SEQ ID NO: 7477 - DNA, 33 bp, Artificial Sequence
  Synthesized
gctcagcagcgtggtttggatcctgttgctcag

SEQ ID NO: 7478 - DNA, 33 bp, Artificial Sequence
  Synthesized
gctcagcagcgtggtaatatgattcctgctcag

SEQ ID NO: 7479 - DNA, 33 bp, Artificial Sequence
  Synthesized
gctcagcagcgtggtcctaatttgggtgctcag

SEQ ID NO: 7480 - DNA, 33 bp, Artificial Sequence
  Synthesized
gctcagcagcgtcattctattgtttctgctcag

SEQ ID NO: 7481 - DNA, 33 bp, Artificial Sequence
  Synthesized
gctcagcagcgtattgagcgtgttaatgctcag

SEQ ID NO: 7482 - DNA, 33 bp, Artificial Sequence
  Synthesized
gctcagcagcgtatttctgatcctcgtgctcag

SEQ ID NO: 7483 - DNA, 33 bp, Artificial Sequence
  Synthesized
gctcagcagcgtatttctatgtctgctgctcag

SEQ ID NO: 7484 - DNA, 33 bp, Artificial Sequence
  Synthesized
gctcagcagcgtttgcctcgtgctgctgctcag

SEQ ID NO: 7485 - DNA, 33 bp, Artificial Sequence
  Synthesized
gctcagcagcgtttgcctcgtcatggtgctcag

SEQ ID NO: 7486 - DNA, 33 bp, Artificial Sequence
  Synthesized
gctcagcagcgtatgggtactgtttctgctcag

SEQ ID NO: 7487 - DNA, 33 bp, Artificial Sequence
  Synthesized
gctcagcagcgtatgtctgttcaggatgctcag

SEQ ID NO: 7488 - DNA, 33 bp, Artificial Sequence
  Synthesized
gctcagcagcgtaatgttatggctgatgctcag

SEQ ID NO: 7489 - DNA, 33 bp, Artificial Sequence
  Synthesized
gctcagcagcgtcaggagcgttttactgctcag

SEQ ID NO: 7490 - DNA, 33 bp, Artificial Sequence
  Synthesized
gctcagcagcgttcttctactcagggtgctcag

SEQ ID NO: 7491 - DNA, 33 bp, Artificial Sequence
  Synthesized
gctcagcagcgtactttgactccttctgctcag

SEQ ID NO: 7492 - DNA, 33 bp, Artificial Sequence
  Synthesized
gctcagcagcgtacttctactgctttggctcag

SEQ ID NO: 7493 - DNA, 33 bp, Artificial Sequence
  Synthesized
gctcagcagcgtgttggtcgtgatactgctcag

SEQ ID NO: 7494 - DNA, 33 bp, Artificial Sequence
  Synthesized
gctcagcagcgtgtttcttctcagcatgctcag

SEQ ID NO: 7495 - DNA, 33 bp, Artificial Sequence
  Synthesized
gctcagcagcgtgttactacttctactgctcag

SEQ ID NO: 7496 - DNA, 33 bp, Artificial Sequence
  Synthesized
gctcagcagtctgctggtcgttcttctgctcag

SEQ ID NO: 7497 - DNA, 33 bp, Artificial Sequence
  Synthesized
gctcagcagtctaaggattctttgcgtgctcag

SEQ ID NO: 7498 - DNA, 33 bp, Artificial Sequence
  Synthesized
gctcagcagtctcagaagactacttatgctcag

SEQ ID NO: 7499 - DNA, 33 bp, Artificial Sequence
  Synthesized
gctcagcagtctcgtttgactcagaatgctcag

SEQ ID NO: 7500 - DNA, 33 bp, Artificial Sequence
  Synthesized
gctcagcagtcttctatgactttgactgctcag

SEQ ID NO: 7501 - DNA, 33 bp, Artificial Sequence
  Synthesized
gctcagcagtcttctcgtactttgcctgctcag

SEQ ID NO: 7502 - DNA, 33 bp, Artificial Sequence
  Synthesized
gctcagcagtcttcttctcatcagaaggctcag

SEQ ID NO: 7503 - DNA, 33 bp, Artificial Sequence
  Synthesized
gctcagcagtctactggtattcgttctgctcag

SEQ ID NO: 7504 - DNA, 33 bp, Artificial Sequence
  Synthesized
gctcagcagtctactaagcctatgttggctcag

SEQ ID NO: 7505 - DNA, 33 bp, Artificial Sequence
  Synthesized
gctcagcagactggtgagcgtcgtactgctcag

SEQ ID NO: 7506 - DNA, 33 bp, Artificial Sequence
  Synthesized
gctcagcagactcatgcttatttgggtgctcag

SEQ ID NO: 7507 - DNA, 33 bp, Artificial Sequence
  Synthesized
gctcagcagactattcctggtgttaaggctcag

SEQ ID NO: 7508 - DNA, 33 bp, Artificial Sequence
  Synthesized
gctcagcagactaagttgcctcagttggctcag

SEQ ID NO: 7509 - DNA, 33 bp, Artificial Sequence
  Synthesized
gctcagcagactttgcagaattctcgtgctcag

SEQ ID NO: 7510 - DNA, 33 bp, Artificial Sequence
  Synthesized
gctcagcagactttgactatgcgtactgctcag

SEQ ID NO: 7511 - DNA, 33 bp, Artificial Sequence
  Synthesized
gctcagcagactaatcagcgttctgctgctcag

SEQ ID NO: 7512 - DNA, 33 bp, Artificial Sequence
  Synthesized
gctcagcagactaatgttaaggttcaggctcag

SEQ ID NO: 7513 - DNA, 33 bp, Artificial Sequence
  Synthesized
gctcagcagactcgttctgttcctactgctcag

SEQ ID NO: 7514 - DNA, 33 bp, Artificial Sequence
  Synthesized
gctcagcagactcgtgttgctcctaatgctcag

SEQ ID NO: 7515 - DNA, 33 bp, Artificial Sequence
  Synthesized
gctcagcagacttctggtactcgttatgctcag

SEQ ID NO: 7516 - DNA, 33 bp, Artificial Sequence
  Synthesized
gctcagcagacttcttctttgcctaatgctcag

SEQ ID NO: 7517 - DNA, 33 bp, Artificial Sequence
  Synthesized
gctcagcagactacttcttctcctcgtgctcag

SEQ ID NO: 7518 - DNA, 33 bp, Artificial Sequence
  Synthesized
gctcagcagactactgtttatcctattgctcag

SEQ ID NO: 7519 - DNA, 33 bp, Artificial Sequence
  Synthesized
gctcagcaggttcattttaagttgtctgctcag

SEQ ID NO: 7520 - DNA, 33 bp, Artificial Sequence
  Synthesized
gctcagcaggttatttctcatgatcgtgctcag

SEQ ID NO: 7521 - DNA, 33 bp, Artificial Sequence
  Synthesized
gctcagcaggttaagcagcagatttctgctcag

SEQ ID NO: 7522 - DNA, 33 bp, Artificial Sequence
  Synthesized
gctcagcaggttatgtctggttctactgctcag

SEQ ID NO: 7523 - DNA, 33 bp, Artificial Sequence
  Synthesized
gctcagcaggtttcttctcagactcgtgctcag

SEQ ID NO: 7524 - DNA, 33 bp, Artificial Sequence
  Synthesized
gctcagcaggtttcttctactgctcgtgctcag

SEQ ID NO: 7525 - DNA, 33 bp, Artificial Sequence
  Synthesized
gctcagcagtataagggtgatttggttgctcag

SEQ ID NO: 7526 - DNA, 33 bp, Artificial Sequence
  Synthesized
gctcagcagtattctttgaaggtttctgctcag

SEQ ID NO: 7527 - DNA, 33 bp, Artificial Sequence
  Synthesized
gctcagcagtatactcgtttggagactgctcag

SEQ ID NO: 7528 - DNA, 33 bp, Artificial Sequence
  Synthesized
gctcagcgtgctgctgcttctgctgatgctcag

SEQ ID NO: 7529 - DNA, 33 bp, Artificial Sequence
  Synthesized
gctcagcgtgctgcttctgagattactgctcag

SEQ ID NO: 7530 - DNA, 33 bp, Artificial Sequence
  Synthesized
gctcagcgtgctgcttctttgactactgctcag

SEQ ID NO: 7531 - DNA, 33 bp, Artificial Sequence
  Synthesized
gctcagcgtgctgctactaatgctggtgctcag

SEQ ID NO: 7532 - DNA, 33 bp, Artificial Sequence
  Synthesized
gctcagcgtgctgatcgtcagtcttctgctcag

SEQ ID NO: 7533 - DNA, 33 bp, Artificial Sequence
  Synthesized
gctcagcgtgctgaggctttgtcttctgctcag

SEQ ID NO: 7534 - DNA, 33 bp, Artificial Sequence
  Synthesized
gctcagcgtgctgagcagacttctgttgctcag

SEQ ID NO: 7535 - DNA, 33 bp, Artificial Sequence
  Synthesized
gctcagcgtgctggttcttctttgattgctcag

SEQ ID NO: 7536 - DNA, 33 bp, Artificial Sequence
  Synthesized
gctcagcgtgctggtacttattctggtgctcag

SEQ ID NO: 7537 - DNA, 33 bp, Artificial Sequence
  Synthesized
gctcagcgtgctttgcctcgttttcctgctcag

SEQ ID NO: 7538 - DNA, 33 bp, Artificial Sequence
  Synthesized
gctcagcgtgctatggagggtcagaaggctcag

SEQ ID NO: 7539 - DNA, 33 bp, Artificial Sequence
  Synthesized
gctcagcgtgctaatgctggtttgaatgctcag

SEQ ID NO: 7540 - DNA, 33 bp, Artificial Sequence
  Synthesized
gctcagcgtgctaatggttttgatcgtgctcag

SEQ ID NO: 7541 - DNA, 33 bp, Artificial Sequence
  Synthesized
gctcagcgtgctccttctattggtatggctcag

SEQ ID NO: 7542 - DNA, 33 bp, Artificial Sequence
  Synthesized
gctcagcgtgcttctgctatgaatgctgctcag

SEQ ID NO: 7543 - DNA, 33 bp, Artificial Sequence
  Synthesized
gctcagcgtgcttctcaggttggtaatgctcag

SEQ ID NO: 7544 - DNA, 33 bp, Artificial Sequence
  Synthesized
gctcagcgtgcttcttctattcctattgctcag

SEQ ID NO: 7545 - DNA, 33 bp, Artificial Sequence
  Synthesized
gctcagcgtgcttcttctccttattctgctcag

SEQ ID NO: 7546 - DNA, 33 bp, Artificial Sequence
  Synthesized
gctcagcgtgcttctactatgtctcaggctcag

SEQ ID NO: 7547 - DNA, 33 bp, Artificial Sequence
  Synthesized
gctcagcgtgctactcagcctactcatgctcag

SEQ ID NO: 7548 - DNA, 33 bp, Artificial Sequence
  Synthesized
gctcagcgtgctactactactggttctgctcag

SEQ ID NO: 7549 - DNA, 33 bp, Artificial Sequence
  Synthesized
gctcagcgtgctgttaattcttttatggctcag

SEQ ID NO: 7550 - DNA, 33 bp, Artificial Sequence
  Synthesized
gctcagcgtgctgttactaatactttggctcag

SEQ ID NO: 7551 - DNA, 33 bp, Artificial Sequence
  Synthesized
gctcagcgtgatgctgttactactcgtgctcag

SEQ ID NO: 7552 - DNA, 33 bp, Artificial Sequence
  Synthesized
gctcagcgtgatgatactaagtctcgtgctcag

SEQ ID NO: 7553 - DNA, 33 bp, Artificial Sequence
  Synthesized
gctcagcgtgattttgctttgaatactgctcag

SEQ ID NO: 7554 - DNA, 33 bp, Artificial Sequence
  Synthesized
gctcagcgtgatggttcttctactatggctcag

SEQ ID NO: 7555 - DNA, 33 bp, Artificial Sequence
  Synthesized
gctcagcgtgataaggctactatttctgctcag

SEQ ID NO: 7556 - DNA, 33 bp, Artificial Sequence
  Synthesized
gctcagcgtgatcagttgaatacttctgctcag

SEQ ID NO: 7557 - DNA, 33 bp, Artificial Sequence
  Synthesized
gctcagcgtgatcagcagtctttgttggctcag

SEQ ID NO: 7558 - DNA, 33 bp, Artificial Sequence
  Synthesized
gctcagcgtgatcgtgaggttttgaaggctcag

SEQ ID NO: 7559 - DNA, 33 bp, Artificial Sequence
  Synthesized
gctcagcgtgattcttctaatgttaaggctcag

SEQ ID NO: 7560 - DNA, 33 bp, Artificial Sequence
  Synthesized
gctcagcgtgatactgctaatcctcgtgctcag

SEQ ID NO: 7561 - DNA, 33 bp, Artificial Sequence
  Synthesized
gctcagcgtgatactggtcataagatggctcag

SEQ ID NO: 7562 - DNA, 33 bp, Artificial Sequence
  Synthesized
gctcagcgtgatgttggtcgttttgatgctcag

SEQ ID NO: 7563 - DNA, 33 bp, Artificial Sequence
  Synthesized
gctcagcgtgagcattatactggtgctgctcag

SEQ ID NO: 7564 - DNA, 33 bp, Artificial Sequence
  Synthesized
gctcagcgtgagaagggttctcctatggctcag

SEQ ID NO: 7565 - DNA, 33 bp, Artificial Sequence
  Synthesized
gctcagcgtgagttgcctcgttatgttgctcag

SEQ ID NO: 7566 - DNA, 33 bp, Artificial Sequence
  Synthesized
gctcagcgttttttgcctgctccttttgctcag

SEQ ID NO: 7567 - DNA, 33 bp, Artificial Sequence
  Synthesized
gctcagcgttttcctggttctggtatggctcag

SEQ ID NO: 7568 - DNA, 33 bp, Artificial Sequence
  Synthesized
gctcagcgttttactgatttgggtcaggctcag

SEQ ID NO: 7569 - DNA, 33 bp, Artificial Sequence
  Synthesized
gctcagcgttttacttctcaggatcaggctcag

SEQ ID NO: 7570 - DNA, 33 bp, Artificial Sequence
  Synthesized
gctcagcgttttgtttctgctaataatgctcag

SEQ ID NO: 7571 - DNA, 33 bp, Artificial Sequence
  Synthesized
gctcagcgtggtgctcctcctgctaatgctcag

SEQ ID NO: 7572 - DNA, 33 bp, Artificial Sequence
  Synthesized
gctcagcgtggtgctgttactgctcatgctcag

SEQ ID NO: 7573 - DNA, 33 bp, Artificial Sequence
  Synthesized
gctcagcgtggtgattttcatactattgctcag

SEQ ID NO: 7574 - DNA, 33 bp, Artificial Sequence
  Synthesized
gctcagcgtggtgatcattctactttggctcag

SEQ ID NO: 7575 - DNA, 33 bp, Artificial Sequence
  Synthesized
gctcagcgtggtgatatggctgttactgctcag

SEQ ID NO: 7576 - DNA, 33 bp, Artificial Sequence
  Synthesized
gctcagcgtggtgattcttctggtttggctcag

SEQ ID NO: 7577 - DNA, 33 bp, Artificial Sequence
  Synthesized
gctcagcgtggtggttcttctgctatggctcag

SEQ ID NO: 7578 - DNA, 33 bp, Artificial Sequence
  Synthesized
gctcagcgtggtcatccttcttttatggctcag

SEQ ID NO: 7579 - DNA, 33 bp, Artificial Sequence
  Synthesized
gctcagcgtggtattcctgttggtactgctcag

SEQ ID NO: 7580 - DNA, 33 bp, Artificial Sequence
  Synthesized
gctcagcgtggtttggctgctaatgttgctcag

SEQ ID NO: 7581 - DNA, 33 bp, Artificial Sequence
  Synthesized
gctcagcgtggtttgcctgagattcctgctcag

SEQ ID NO: 7582 - DNA, 33 bp, Artificial Sequence
  Synthesized
gctcagcgtggtttgcctcatggtcatgctcag

SEQ ID NO: 7583 - DNA, 33 bp, Artificial Sequence
  Synthesized
gctcagcgtggtttgcctcatcattctgctcag

SEQ ID NO: 7584 - DNA, 33 bp, Artificial Sequence
  Synthesized
gctcagcgtggtttgcctattcgtcgtgctcag

SEQ ID NO: 7585 - DNA, 33 bp, Artificial Sequence
  Synthesized
gctcagcgtggtttgcctcgtgagcaggctcag

SEQ ID NO: 7586 - DNA, 33 bp, Artificial Sequence
  Synthesized
gctcagcgtggtttgcctcgtaatgaggctcag

SEQ ID NO: 7587 - DNA, 33 bp, Artificial Sequence
  Synthesized
gctcagcgtggtttgcctcgtcgtggtgctcag

SEQ ID NO: 7588 - DNA, 33 bp, Artificial Sequence
  Synthesized
gctcagcgtggtttgcctactcgtattgctcag

SEQ ID NO: 7589 - DNA, 33 bp, Artificial Sequence
  Synthesized
gctcagcgtggtatggctcctcctaatgctcag

SEQ ID NO: 7590 - DNA, 33 bp, Artificial Sequence
  Synthesized
gctcagcgtggtatgaatcctactactgctcag

SEQ ID NO: 7591 - DNA, 33 bp, Artificial Sequence
  Synthesized
gctcagcgtggtcctttttctgctatggctcag

SEQ ID NO: 7592 - DNA, 33 bp, Artificial Sequence
  Synthesized
gctcagcgtggtcctcagtcttttatggctcag

SEQ ID NO: 7593 - DNA, 33 bp, Artificial Sequence
  Synthesized
gctcagcgtggtccttctatgtctcctgctcag

SEQ ID NO: 7594 - DNA, 33 bp, Artificial Sequence
  Synthesized
gctcagcgtggtactttgatgtcttctgctcag

SEQ ID NO: 7595 - DNA, 33 bp, Artificial Sequence
  Synthesized
gctcagcgtggtactaatgatatgaatgctcag

SEQ ID NO: 7596 - DNA, 33 bp, Artificial Sequence
  Synthesized
gctcagcgtggtacttctttgatggctgctcag

SEQ ID NO: 7597 - DNA, 33 bp, Artificial Sequence
  Synthesized
gctcagcgtcatgatgttaatcctgttgctcag

SEQ ID NO: 7598 - DNA, 33 bp, Artificial Sequence
  Synthesized
gctcagcgtcatggtggttcttttatggctcag

SEQ ID NO: 7599 - DNA, 33 bp, Artificial Sequence
  Synthesized
gctcagcgtcatcatgatccttctactgctcag

SEQ ID NO: 7600 - DNA, 33 bp, Artificial Sequence
  Synthesized
gctcagcgtcatttgcctcatcataatgctcag

SEQ ID NO: 7601 - DNA, 33 bp, Artificial Sequence
  Synthesized
gctcagcgtcatttgcctcgttttaaggctcag

SEQ ID NO: 7602 - DNA, 33 bp, Artificial Sequence
  Synthesized
gctcagcgtcatttgccttatggtggtgctcag

SEQ ID NO: 7603 - DNA, 33 bp, Artificial Sequence
  Synthesized
gctcagcgtcatgttaattcttttatggctcag

SEQ ID NO: 7604 - DNA, 33 bp, Artificial Sequence
  Synthesized
gctcagcgtcatgttaatgttaatcctgctcag

SEQ ID NO: 7605 - DNA, 33 bp, Artificial Sequence
  Synthesized
gctcagcgtattgagtcttctaattctgctcag

SEQ ID NO: 7606 - DNA, 33 bp, Artificial Sequence
  Synthesized
gctcagcgtattggtattgatactcgtgctcag

SEQ ID NO: 7607 - DNA, 33 bp, Artificial Sequence
  Synthesized
gctcagcgtattttgcctcgtggtcctgctcag

SEQ ID NO: 7608 - DNA, 33 bp, Artificial Sequence
  Synthesized
gctcagcgtattcctggtgagaagattgctcag

SEQ ID NO: 7609 - DNA, 33 bp, Artificial Sequence
  Synthesized
gctcagcgtattcctactcagatgaatgctcag

SEQ ID NO: 7610 - DNA, 33 bp, Artificial Sequence
  Synthesized
gctcagcgtattcaggctgatcgtcaggctcag

SEQ ID NO: 7611 - DNA, 33 bp, Artificial Sequence
  Synthesized
gctcagcgtatttctgatgatggtaaggctcag

SEQ ID NO: 7612 - DNA, 33 bp, Artificial Sequence
  Synthesized
gctcagcgtatttctacttctcatcaggctcag

SEQ ID NO: 7613 - DNA, 33 bp, Artificial Sequence
  Synthesized
gctcagcgtattactaataatttgactgctcag

SEQ ID NO: 7614 - DNA, 33 bp, Artificial Sequence
  Synthesized
gctcagcgtattactcctcagggttctgctcag

SEQ ID NO: 7615 - DNA, 33 bp, Artificial Sequence
  Synthesized
gctcagcgtattgttaattcttcttctgctcag

SEQ ID NO: 7616 - DNA, 33 bp, Artificial Sequence
  Synthesized
gctcagcgtaaggatgtttctgcttttgctcag

SEQ ID NO: 7617 - DNA, 33 bp, Artificial Sequence
  Synthesized
gctcagcgtaaggagttgaatactttggctcag

SEQ ID NO: 7618 - DNA, 33 bp, Artificial Sequence
  Synthesized
gctcagcgtaagactactgatattttggctcag

SEQ ID NO: 7619 - DNA, 33 bp, Artificial Sequence
  Synthesized
gctcagcgtttggcttctcagaattctgctcag

SEQ ID NO: 7620 - DNA, 33 bp, Artificial Sequence
  Synthesized
gctcagcgtttggatactcatggtaatgctcag

SEQ ID NO: 7621 - DNA, 33 bp, Artificial Sequence
  Synthesized
gctcagcgtttggagaataatcctttggctcag

SEQ ID NO: 7622 - DNA, 33 bp, Artificial Sequence
  Synthesized
gctcagcgtttggagcctaatatttctgctcag

SEQ ID NO: 7623 - DNA, 33 bp, Artificial Sequence
  Synthesized
gctcagcgtttgggtatggctaatactgctcag

SEQ ID NO: 7624 - DNA, 33 bp, Artificial Sequence
  Synthesized
gctcagcgtttgggtaatgatgctactgctcag

SEQ ID NO: 7625 - DNA, 33 bp, Artificial Sequence
  Synthesized
gctcagcgtttgcatggttcttttatggctcag

SEQ ID NO: 7626 - DNA, 33 bp, Artificial Sequence
  Synthesized
gctcagcgtttgcatgttgaggagaaggctcag

SEQ ID NO: 7627 - DNA, 33 bp, Artificial Sequence
  Synthesized
gctcagcgtttgttggctcatgatttggctcag

SEQ ID NO: 7628 - DNA, 33 bp, Artificial Sequence
  Synthesized
gctcagcgtttgttgaaggatactgttgctcag

SEQ ID NO: 7629 - DNA, 33 bp, Artificial Sequence
  Synthesized
gctcagcgtttgaatccttctaatgctgctcag

SEQ ID NO: 7630 - DNA, 33 bp, Artificial Sequence
  Synthesized
gctcagcgtttgcctcagtctgatattgctcag

SEQ ID NO: 7631 - DNA, 33 bp, Artificial Sequence
  Synthesized
gctcagcgtttgccttctgctgttaatgctcag

SEQ ID NO: 7632 - DNA, 33 bp, Artificial Sequence
  Synthesized
gctcagcgtttgcaggattctcagactgctcag

SEQ ID NO: 7633 - DNA, 33 bp, Artificial Sequence
  Synthesized
gctcagcgtttgtctgctggtgatgctgctcag

SEQ ID NO: 7634 - DNA, 33 bp, Artificial Sequence
  Synthesized
gctcagcgtttgtctattggtaatgatgctcag

SEQ ID NO: 7635 - DNA, 33 bp, Artificial Sequence
  Synthesized
gctcagcgtttgtctttgcctactatggctcag

SEQ ID NO: 7636 - DNA, 33 bp, Artificial Sequence
  Synthesized
gctcagcgtttgtcttctactaatgttgctcag

SEQ ID NO: 7637 - DNA, 33 bp, Artificial Sequence
  Synthesized
gctcagcgtttgtctactgcttctgaggctcag

SEQ ID NO: 7638 - DNA, 33 bp, Artificial Sequence
  Synthesized
gctcagcgtttgtctactcgtgatcctgctcag

SEQ ID NO: 7639 - DNA, 33 bp, Artificial Sequence
  Synthesized
gctcagcgtttgtctacttctcagggtgctcag

SEQ ID NO: 7640 - DNA, 33 bp, Artificial Sequence
  Synthesized
gctcagcgtttgactatttcttctgctgctcag

SEQ ID NO: 7641 - DNA, 33 bp, Artificial Sequence
  Synthesized
gctcagcgtttgacttctcatgattctgctcag

SEQ ID NO: 7642 - DNA, 33 bp, Artificial Sequence
  Synthesized
gctcagcgtatggctactaattcttctgctcag

SEQ ID NO: 7643 - DNA, 33 bp, Artificial Sequence
  Synthesized
gctcagcgtatggatttgatttctaatgctcag

SEQ ID NO: 7644 - DNA, 33 bp, Artificial Sequence
  Synthesized
gctcagcgtatggagacttcttcttctgctcag

SEQ ID NO: 7645 - DNA, 33 bp, Artificial Sequence
  Synthesized
gctcagcgtatgtttccttctgctatggctcag

SEQ ID NO: 7646 - DNA, 33 bp, Artificial Sequence
  Synthesized
gctcagcgtatgaagcattcttttatggctcag

SEQ ID NO: 7647 - DNA, 33 bp, Artificial Sequence
  Synthesized
gctcagcgtatgttgcctcagattggtgctcag

SEQ ID NO: 7648 - DNA, 33 bp, Artificial Sequence
  Synthesized
gctcagcgtatgttgcctcgtttgtctgctcag

SEQ ID NO: 7649 - DNA, 33 bp, Artificial Sequence
  Synthesized
gctcagcgtatgccttctactttggctgctcag

SEQ ID NO: 7650 - DNA, 33 bp, Artificial Sequence
  Synthesized
gctcagcgtatgcctactgctcattctgctcag

SEQ ID NO: 7651 - DNA, 33 bp, Artificial Sequence
  Synthesized
gctcagcgtatgtcttctgcttctgttgctcag

SEQ ID NO: 7652 - DNA, 33 bp, Artificial Sequence
  Synthesized
gctcagcgtatgtcttcttcttctgatgctcag

SEQ ID NO: 7653 - DNA, 33 bp, Artificial Sequence
  Synthesized
gctcagcgtatgtctgttgcttcttctgctcag

SEQ ID NO: 7654 - DNA, 33 bp, Artificial Sequence
  Synthesized
gctcagcgtatgacttctcagcatgatgctcag

SEQ ID NO: 7655 - DNA, 33 bp, Artificial Sequence
  Synthesized
gctcagcgtatggttaatgcttctactgctcag

SEQ ID NO: 7656 - DNA, 33 bp, Artificial Sequence
  Synthesized
gctcagcgtaatgctattaatgagactgctcag

SEQ ID NO: 7657 - DNA, 33 bp, Artificial Sequence
  Synthesized
gctcagcgtaatgcttctttgaatactgctcag

SEQ ID NO: 7658 - DNA, 33 bp, Artificial Sequence
  Synthesized
gctcagcgtaatgctactcgtactttggctcag

SEQ ID NO: 7659 - DNA, 33 bp, Artificial Sequence
  Synthesized
gctcagcgtaattttaaggatggttctgctcag

SEQ ID NO: 7660 - DNA, 33 bp, Artificial Sequence
  Synthesized
gctcagcgtaattttactcgtggttatgctcag

SEQ ID NO: 7661 - DNA, 33 bp, Artificial Sequence
  Synthesized
gctcagcgtaattttactcgtcagggtgctcag

SEQ ID NO: 7662 - DNA, 33 bp, Artificial Sequence
  Synthesized
gctcagcgtaattttactcgttatggtgctcag

SEQ ID NO: 7663 - DNA, 33 bp, Artificial Sequence
  Synthesized
gctcagcgtaatggtgattctgctatggctcag

SEQ ID NO: 7664 - DNA, 33 bp, Artificial Sequence
  Synthesized
gctcagcgtaatggttctcctgagttggctcag

SEQ ID NO: 7665 - DNA, 33 bp, Artificial Sequence
  Synthesized
gctcagcgtaatggtactcgtgctactgctcag

SEQ ID NO: 7666 - DNA, 33 bp, Artificial Sequence
  Synthesized
gctcagcgtaatggtactcgtcataaggctcag

SEQ ID NO: 7667 - DNA, 33 bp, Artificial Sequence
  Synthesized
gctcagcgtaatggtactcgtaatcatgctcag

SEQ ID NO: 7668 - DNA, 33 bp, Artificial Sequence
  Synthesized
gctcagcgtaatcatgctcagtctgttgctcag

SEQ ID NO: 7669 - DNA, 33 bp, Artificial Sequence
  Synthesized
gctcagcgtaatcatggttctgctatggctcag

SEQ ID NO: 7670 - DNA, 33 bp, Artificial Sequence
  Synthesized
gctcagcgtaatcatactcgtgctaaggctcag

SEQ ID NO: 7671 - DNA, 33 bp, Artificial Sequence
  Synthesized
gctcagcgtaatcatactcgtggtaatgctcag

SEQ ID NO: 7672 - DNA, 33 bp, Artificial Sequence
  Synthesized
gctcagcgtaatatttctttgtcttctgctcag

SEQ ID NO: 7673 - DNA, 33 bp, Artificial Sequence
  Synthesized
gctcagcgtaatattactcgtgcttctgctcag

SEQ ID NO: 7674 - DNA, 33 bp, Artificial Sequence
  Synthesized
gctcagcgtaatattactcgtatggttgctcag

SEQ ID NO: 7675 - DNA, 33 bp, Artificial Sequence
  Synthesized
gctcagcgtaataagactcgtgctcgtgctcag

SEQ ID NO: 7676 - DNA, 33 bp, Artificial Sequence
  Synthesized
gctcagcgtaatttggagtctgtttctgctcag

SEQ ID NO: 7677 - DNA, 33 bp, Artificial Sequence
  Synthesized
gctcagcgtaatttgggtaatactactgctcag

SEQ ID NO: 7678 - DNA, 33 bp, Artificial Sequence
  Synthesized
gctcagcgtaatttgggttctgctatggctcag

SEQ ID NO: 7679 - DNA, 33 bp, Artificial Sequence
  Synthesized
gctcagcgtaatttgatttctaatcaggctcag

SEQ ID NO: 7680 - DNA, 33 bp, Artificial Sequence
  Synthesized
gctcagcgtaatttgcctaagatgggtgctcag

SEQ ID NO: 7681 - DNA, 33 bp, Artificial Sequence
  Synthesized
gctcagcgtaatatgcctactgttcaggctcag

SEQ ID NO: 7682 - DNA, 33 bp, Artificial Sequence
  Synthesized
gctcagcgtaataatactgcttttaatgctcag

SEQ ID NO: 7683 - DNA, 33 bp, Artificial Sequence
  Synthesized
gctcagcgtaataatactgctggtcgtgctcag

SEQ ID NO: 7684 - DNA, 33 bp, Artificial Sequence
  Synthesized
gctcagcgtaataatactgagcgtcgtgctcag

SEQ ID NO: 7685 - DNA, 33 bp, Artificial Sequence
  Synthesized
gctcagcgtaataatacttttaagcctgctcag

SEQ ID NO: 7686 - DNA, 33 bp, Artificial Sequence
  Synthesized
gctcagcgtaataatactggtatttctgctcag

SEQ ID NO: 7687 - DNA, 33 bp, Artificial Sequence
  Synthesized
gctcagcgtaataatactggtcctggtgctcag

SEQ ID NO: 7688 - DNA, 33 bp, Artificial Sequence
  Synthesized
gctcagcgtaataatactcattttaaggctcag

SEQ ID NO: 7689 - DNA, 33 bp, Artificial Sequence
  Synthesized
gctcagcgtaataatactaagtttcatgctcag

SEQ ID NO: 7690 - DNA, 33 bp, Artificial Sequence
  Synthesized
gctcagcgtaataatactttgaatcctgctcag

SEQ ID NO: 7691 - DNA, 33 bp, Artificial Sequence
  Synthesized
gctcagcgtaataatactttgccttttgctcag

SEQ ID NO: 7692 - DNA, 33 bp, Artificial Sequence
  Synthesized
gctcagcgtaataatactccttttcgtgctcag

SEQ ID NO: 7693 - DNA, 33 bp, Artificial Sequence
  Synthesized
gctcagcgtaataatactcctaaggctgctcag

SEQ ID NO: 7694 - DNA, 33 bp, Artificial Sequence
  Synthesized
gctcagcgtaataatactcctcctttggctcag

SEQ ID NO: 7695 - DNA, 33 bp, Artificial Sequence
  Synthesized
gctcagcgtaataatactcgtattatggctcag

SEQ ID NO: 7696 - DNA, 33 bp, Artificial Sequence
  Synthesized
gctcagcgtaataatactcgtccttttgctcag

SEQ ID NO: 7697 - DNA, 33 bp, Artificial Sequence
  Synthesized
gctcagcgtaataatactcgtcctggtgctcag

SEQ ID NO: 7698 - DNA, 33 bp, Artificial Sequence
  Synthesized
gctcagcgtaatcctgctatgactactgctcag

SEQ ID NO: 7699 - DNA, 33 bp, Artificial Sequence
  Synthesized
gctcagcgtaatcctggtgatatttctgctcag

SEQ ID NO: 7700 - DNA, 33 bp, Artificial Sequence
  Synthesized
gctcagcgtaatcctaagcgtaattctgctcag

SEQ ID NO: 7701 - DNA, 33 bp, Artificial Sequence
  Synthesized
gctcagcgtaatcctcctatgtctggtgctcag

SEQ ID NO: 7702 - DNA, 33 bp, Artificial Sequence
  Synthesized
gctcagcgtaatcctccttcttttatggctcag

SEQ ID NO: 7703 - DNA, 33 bp, Artificial Sequence
  Synthesized
gctcagcgtaatcctcaggttttttctgctcag

SEQ ID NO: 7704 - DNA, 33 bp, Artificial Sequence
  Synthesized
gctcagcgtaatcctcaggttaagtctgctcag

SEQ ID NO: 7705 - DNA, 33 bp, Artificial Sequence
  Synthesized
gctcagcgtaatccttctgttggttctgctcag

SEQ ID NO: 7706 - DNA, 33 bp, Artificial Sequence
  Synthesized
gctcagcgtaatcctactggtcgttctgctcag

SEQ ID NO: 7707 - DNA, 33 bp, Artificial Sequence
  Synthesized
gctcagcgtaatcctactcgtggtggtgctcag

SEQ ID NO: 7708 - DNA, 33 bp, Artificial Sequence
  Synthesized
gctcagcgtaatcctgttggtcgttctgctcag

SEQ ID NO: 7709 - DNA, 33 bp, Artificial Sequence
  Synthesized
gctcagcgtaatcctgttcatcgttctgctcag

SEQ ID NO: 7710 - DNA, 33 bp, Artificial Sequence
  Synthesized
gctcagcgtaatcctgttcagcgttctgctcag

SEQ ID NO: 7711 - DNA, 33 bp, Artificial Sequence
  Synthesized
gctcagcgtaatcctgttcgtcgttctgctcag

SEQ ID NO: 7712 - DNA, 33 bp, Artificial Sequence
  Synthesized
gctcagcgtaatcctgttgttcgttctgctcag

SEQ ID NO: 7713 - DNA, 33 bp, Artificial Sequence
  Synthesized
gctcagcgtaatccttatgagtattctgctcag

SEQ ID NO: 7714 - DNA, 33 bp, Artificial Sequence
  Synthesized
gctcagcgtaatccttatactttgtctgctcag

SEQ ID NO: 7715 - DNA, 33 bp, Artificial Sequence
  Synthesized
gctcagcgtaatcagttgtctactgctgctcag

SEQ ID NO: 7716 - DNA, 33 bp, Artificial Sequence
  Synthesized
gctcagcgtaatcagactattgctcatgctcag

SEQ ID NO: 7717 - DNA, 33 bp, Artificial Sequence
  Synthesized
gctcagcgtaatcgtactcgtcctcatgctcag

SEQ ID NO: 7718 - DNA, 33 bp, Artificial Sequence
  Synthesized
gctcagcgtaattctatggattatttggctcag

SEQ ID NO: 7719 - DNA, 33 bp, Artificial Sequence
  Synthesized
gctcagcgtaattcttctcctatgcaggctcag

SEQ ID NO: 7720 - DNA, 33 bp, Artificial Sequence
  Synthesized
gctcagcgtaattctgttacttctatggctcag

SEQ ID NO: 7721 - DNA, 33 bp, Artificial Sequence
  Synthesized
gctcagcgtaatactgctggtttgttggctcag

SEQ ID NO: 7722 - DNA, 33 bp, Artificial Sequence
  Synthesized
gctcagcgtaatactgcttcttcttatgctcag

SEQ ID NO: 7723 - DNA, 33 bp, Artificial Sequence
  Synthesized
gctcagcgtaatactttgcagactgctgctcag

SEQ ID NO: 7724 - DNA, 33 bp, Artificial Sequence
  Synthesized
gctcagcgtaatgttgattcttctaaggctcag

SEQ ID NO: 7725 - DNA, 33 bp, Artificial Sequence
  Synthesized
gctcagcgtaatgttactaatgttaatgctcag

SEQ ID NO: 7726 - DNA, 33 bp, Artificial Sequence
  Synthesized
gctcagcgtaatgttactcgtaagcgtgctcag

SEQ ID NO: 7727 - DNA, 33 bp, Artificial Sequence
  Synthesized
gctcagcgtaattatactcgtgatcatgctcag

SEQ ID NO: 7728 - DNA, 33 bp, Artificial Sequence
  Synthesized
gctcagcgtaattatactcgtcctcaggctcag

SEQ ID NO: 7729 - DNA, 33 bp, Artificial Sequence
  Synthesized
gctcagcgtaattatactcgttcttatgctcag

SEQ ID NO: 7730 - DNA, 33 bp, Artificial Sequence
  Synthesized
gctcagcgtcctgcttcttctactcctgctcag

SEQ ID NO: 7731 - DNA, 33 bp, Artificial Sequence
  Synthesized
gctcagcgtcctgatttgaatcctattgctcag

SEQ ID NO: 7732 - DNA, 33 bp, Artificial Sequence
  Synthesized
gctcagcgtcctgatactaatcgtgctgctcag

SEQ ID NO: 7733 - DNA, 33 bp, Artificial Sequence
  Synthesized
gctcagcgtcctggtgcttctatgtctgctcag

SEQ ID NO: 7734 - DNA, 33 bp, Artificial Sequence
  Synthesized
gctcagcgtcctggttctactggtggtgctcag

SEQ ID NO: 7735 - DNA, 33 bp, Artificial Sequence
  Synthesized
gctcagcgtcctggtgtttctgctactgctcag

SEQ ID NO: 7736 - DNA, 33 bp, Artificial Sequence
  Synthesized
gctcagcgtcctaagcattctgctatggctcag

SEQ ID NO: 7737 - DNA, 33 bp, Artificial Sequence
  Synthesized
gctcagcgtcctaaggttactgatgctgctcag

SEQ ID NO: 7738 - DNA, 33 bp, Artificial Sequence
  Synthesized
gctcagcgtcctttgttggatgctgttgctcag

SEQ ID NO: 7739 - DNA, 33 bp, Artificial Sequence
  Synthesized
gctcagcgtcctttgcctttttttaaggctcag

SEQ ID NO: 7740 - DNA, 33 bp, Artificial Sequence
  Synthesized
gctcagcgtcctttgcctcgtggtggtgctcag

SEQ ID NO: 7741 - DNA, 33 bp, Artificial Sequence
  Synthesized
gctcagcgtcctttgcctcgtcgtcctgctcag

SEQ ID NO: 7742 - DNA, 33 bp, Artificial Sequence
  Synthesized
gctcagcgtcctcagtctggttttggtgctcag

SEQ ID NO: 7743 - DNA, 33 bp, Artificial Sequence
  Synthesized
gctcagcgtcctcgtgcttctgctatggctcag

SEQ ID NO: 7744 - DNA, 33 bp, Artificial Sequence
  Synthesized
gctcagcgtccttctgcttctgttgctgctcag

SEQ ID NO: 7745 - DNA, 33 bp, Artificial Sequence
  Synthesized
gctcagcgtccttctttggcttctcaggctcag

SEQ ID NO: 7746 - DNA, 33 bp, Artificial Sequence
  Synthesized
gctcagcgtcctactaatcatttgaatgctcag

SEQ ID NO: 7747 - DNA, 33 bp, Artificial Sequence
  Synthesized
gctcagcgtcctactacttctgctaatgctcag

SEQ ID NO: 7748 - DNA, 33 bp, Artificial Sequence
  Synthesized
gctcagcgtcctactactactcatggtgctcag

SEQ ID NO: 7749 - DNA, 33 bp, Artificial Sequence
  Synthesized
gctcagcgtcctgttggtcctcaggttgctcag

SEQ ID NO: 7750 - DNA, 33 bp, Artificial Sequence
  Synthesized
gctcagcgtcctgttggttctgctatggctcag

SEQ ID NO: 7751 - DNA, 33 bp, Artificial Sequence
  Synthesized
gctcagcgtcaggatcgtgagtcttctgctcag

SEQ ID NO: 7752 - DNA, 33 bp, Artificial Sequence
  Synthesized
gctcagcgtcagcatgatcatccttctgctcag

SEQ ID NO: 7753 - DNA, 33 bp, Artificial Sequence
  Synthesized
gctcagcgtcagttgcctaataaggttgctcag

SEQ ID NO: 7754 - DNA, 33 bp, Artificial Sequence
  Synthesized
gctcagcgtcagatgaatactggtcaggctcag

SEQ ID NO: 7755 - DNA, 33 bp, Artificial Sequence
  Synthesized
gctcagcgtcagaatggtcatgagttggctcag

SEQ ID NO: 7756 - DNA, 33 bp, Artificial Sequence
  Synthesized
gctcagcgtcagaatcagactatggctgctcag

SEQ ID NO: 7757 - DNA, 33 bp, Artificial Sequence
  Synthesized
gctcagcgtcagcctcattctgctatggctcag

SEQ ID NO: 7758 - DNA, 33 bp, Artificial Sequence
  Synthesized
gctcagcgtcagccttcttcttatcaggctcag

SEQ ID NO: 7759 - DNA, 33 bp, Artificial Sequence
  Synthesized
gctcagcgtcagtctactcagatttctgctcag

SEQ ID NO: 7760 - DNA, 33 bp, Artificial Sequence
  Synthesized
gctcagcgtcagactcctgctcctcctgctcag

SEQ ID NO: 7761 - DNA, 33 bp, Artificial Sequence
  Synthesized
gctcagcgtcagactcagactacttctgctcag

SEQ ID NO: 7762 - DNA, 33 bp, Artificial Sequence
  Synthesized
gctcagcgtcagacttctgctcagactgctcag

SEQ ID NO: 7763 - DNA, 33 bp, Artificial Sequence
  Synthesized
gctcagcgtcagacttctttggctttggctcag

SEQ ID NO: 7764 - DNA, 33 bp, Artificial Sequence
  Synthesized
gctcagcgtcgtgatactggtattgttgctcag

SEQ ID NO: 7765 - DNA, 33 bp, Artificial Sequence
  Synthesized
gctcagcgtcgtgagactgtttctgctgctcag

SEQ ID NO: 7766 - DNA, 33 bp, Artificial Sequence
  Synthesized
gctcagcgtcgtggtgagttgttgtctgctcag

SEQ ID NO: 7767 - DNA, 33 bp, Artificial Sequence
  Synthesized
gctcagcgtcgtggtcattcttttatggctcag

SEQ ID NO: 7768 - DNA, 33 bp, Artificial Sequence
  Synthesized
gctcagcgtcgtgttaatgatactactgctcag

SEQ ID NO: 7769 - DNA, 33 bp, Artificial Sequence
  Synthesized
gctcagcgttctgctcctgatcagcgtgctcag

SEQ ID NO: 7770 - DNA, 33 bp, Artificial Sequence
  Synthesized
gctcagcgttctgctacttcttatcctgctcag

SEQ ID NO: 7771 - DNA, 33 bp, Artificial Sequence
  Synthesized
gctcagcgttctgctgttggttcttctgctcag

SEQ ID NO: 7772 - DNA, 33 bp, Artificial Sequence
  Synthesized
gctcagcgttctgataagttgatgatggctcag

SEQ ID NO: 7773 - DNA, 33 bp, Artificial Sequence
  Synthesized
gctcagcgttctgatttgtctggtttggctcag

SEQ ID NO: 7774 - DNA, 33 bp, Artificial Sequence
  Synthesized
gctcagcgttctgatcctcgtggtactgctcag

SEQ ID NO: 7775 - DNA, 33 bp, Artificial Sequence
  Synthesized
gctcagcgttctgatactcattctcaggctcag

SEQ ID NO: 7776 - DNA, 33 bp, Artificial Sequence
  Synthesized
gctcagcgttctgatgttcgttctttggctcag

SEQ ID NO: 7777 - DNA, 33 bp, Artificial Sequence
  Synthesized
gctcagcgttctgagaatcctcgtttggctcag

SEQ ID NO: 7778 - DNA, 33 bp, Artificial Sequence
  Synthesized
gctcagcgttctggttttgctactgctgctcag

SEQ ID NO: 7779 - DNA, 33 bp, Artificial Sequence
  Synthesized
gctcagcgttctggtttggttcagaatgctcag

SEQ ID NO: 7780 - DNA, 33 bp, Artificial Sequence
  Synthesized
gctcagcgttctggtatgattactgctgctcag

SEQ ID NO: 7781 - DNA, 33 bp, Artificial Sequence
  Synthesized
gctcagcgttctggtcagtctatgactgctcag

SEQ ID NO: 7782 - DNA, 33 bp, Artificial Sequence
  Synthesized
gctcagcgttctggtcagtctcctgatgctcag

SEQ ID NO: 7783 - DNA, 33 bp, Artificial Sequence
  Synthesized
gctcagcgttctggttctatgttgcctgctcag

SEQ ID NO: 7784 - DNA, 33 bp, Artificial Sequence
  Synthesized
gctcagcgttctggttcttctggtatggctcag

SEQ ID NO: 7785 - DNA, 33 bp, Artificial Sequence
  Synthesized
gctcagcgttctggtgtttatggtcctgctcag

SEQ ID NO: 7786 - DNA, 33 bp, Artificial Sequence
  Synthesized
gctcagcgttctggttatacttctgatgctcag

SEQ ID NO: 7787 - DNA, 33 bp, Artificial Sequence
  Synthesized
gctcagcgttctttgaatttgcatcctgctcag

SEQ ID NO: 7788 - DNA, 33 bp, Artificial Sequence
  Synthesized
gctcagcgttctttgcctcgtaagcatgctcag

SEQ ID NO: 7789 - DNA, 33 bp, Artificial Sequence
  Synthesized
gctcagcgttctttgcctcgtgttaaggctcag

SEQ ID NO: 7790 - DNA, 33 bp, Artificial Sequence
  Synthesized
gctcagcgttctaatggtatttctttggctcag

SEQ ID NO: 7791 - DNA, 33 bp, Artificial Sequence
  Synthesized
gctcagcgttctaatggtcaggctcaggctcag

SEQ ID NO: 7792 - DNA, 33 bp, Artificial Sequence
  Synthesized
gctcagcgttctaatttgcaggctatggctcag

SEQ ID NO: 7793 - DNA, 33 bp, Artificial Sequence
  Synthesized
gctcagcgttctcctggtcagatgcctgctcag

SEQ ID NO: 7794 - DNA, 33 bp, Artificial Sequence
  Synthesized
gctcagcgttctcctaatcctatgaatgctcag

SEQ ID NO: 7795 - DNA, 33 bp, Artificial Sequence
  Synthesized
gctcagcgttctcagcctactttgggtgctcag

SEQ ID NO: 7796 - DNA, 33 bp, Artificial Sequence
  Synthesized
gctcagcgttctcagcagttgaatcctgctcag

SEQ ID NO: 7797 - DNA, 33 bp, Artificial Sequence
  Synthesized
gctcagcgttctcagtcttctcctcaggctcag

SEQ ID NO: 7798 - DNA, 33 bp, Artificial Sequence
  Synthesized
gctcagcgttctcaggttttggcttctgctcag

SEQ ID NO: 7799 - DNA, 33 bp, Artificial Sequence
  Synthesized
gctcagcgttcttctgctaatgctatggctcag

SEQ ID NO: 7800 - DNA, 33 bp, Artificial Sequence
  Synthesized
gctcagcgttcttctgctactggtactgctcag

SEQ ID NO: 7801 - DNA, 33 bp, Artificial Sequence
  Synthesized
gctcagcgttcttctggtgtttctaatgctcag

SEQ ID NO: 7802 - DNA, 33 bp, Artificial Sequence
  Synthesized
gctcagcgttcttctcatccttctggtgctcag

SEQ ID NO: 7803 - DNA, 33 bp, Artificial Sequence
  Synthesized
gctcagcgttcttctttgggttctaatgctcag

SEQ ID NO: 7804 - DNA, 33 bp, Artificial Sequence
  Synthesized
gctcagcgttcttctttgcagaatcaggctcag

SEQ ID NO: 7805 - DNA, 33 bp, Artificial Sequence
  Synthesized
gctcagcgttcttctatgcaggagcgtgctcag

SEQ ID NO: 7806 - DNA, 33 bp, Artificial Sequence
  Synthesized
gctcagcgttcttctaattctggtcaggctcag

SEQ ID NO: 7807 - DNA, 33 bp, Artificial Sequence
  Synthesized
gctcagcgttcttctcagtctatgggtgctcag

SEQ ID NO: 7808 - DNA, 33 bp, Artificial Sequence
  Synthesized
gctcagcgttcttcttctggtatgggtgctcag

SEQ ID NO: 7809 - DNA, 33 bp, Artificial Sequence
  Synthesized
gctcagcgttcttcttcttctcagggtgctcag

SEQ ID NO: 7810 - DNA, 33 bp, Artificial Sequence
  Synthesized
gctcagcgttcttctactcagatggctgctcag

SEQ ID NO: 7811 - DNA, 33 bp, Artificial Sequence
  Synthesized
gctcagcgttcttctacttctgttcctgctcag

SEQ ID NO: 7812 - DNA, 33 bp, Artificial Sequence
  Synthesized
gctcagcgttcttctgttgctcgttctgctcag

SEQ ID NO: 7813 - DNA, 33 bp, Artificial Sequence
  Synthesized
gctcagcgttcttcttattggttgttggctcag

SEQ ID NO: 7814 - DNA, 33 bp, Artificial Sequence
  Synthesized
gctcagcgttctactgaggatcgtaaggctcag

SEQ ID NO: 7815 - DNA, 33 bp, Artificial Sequence
  Synthesized
gctcagcgttctactggtgttacttctgctcag

SEQ ID NO: 7816 - DNA, 33 bp, Artificial Sequence
  Synthesized
gctcagcgttctacttctatgaatggtgctcag

SEQ ID NO: 7817 - DNA, 33 bp, Artificial Sequence
  Synthesized
gctcagcgttctacttcttctttgttggctcag

SEQ ID NO: 7818 - DNA, 33 bp, Artificial Sequence
  Synthesized
gctcagcgtactggtattcatgcttctgctcag

SEQ ID NO: 7819 - DNA, 33 bp, Artificial Sequence
  Synthesized
gctcagcgtactttgttttctgctatggctcag

SEQ ID NO: 7820 - DNA, 33 bp, Artificial Sequence
  Synthesized
gctcagcgtactttgcctgagactaatgctcag

SEQ ID NO: 7821 - DNA, 33 bp, Artificial Sequence
  Synthesized
gctcagcgtactttgcctggtcagtatgctcag

SEQ ID NO: 7822 - DNA, 33 bp, Artificial Sequence
  Synthesized
gctcagcgtactttgcctaattctaatgctcag

SEQ ID NO: 7823 - DNA, 33 bp, Artificial Sequence
  Synthesized
gctcagcgtactaatattcatactgatgctcag

SEQ ID NO: 7824 - DNA, 33 bp, Artificial Sequence
  Synthesized
gctcagcgtactcctggtatgactcctgctcag

SEQ ID NO: 7825 - DNA, 33 bp, Artificial Sequence
  Synthesized
gctcagcgtactcctatgtctcagactgctcag

SEQ ID NO: 7826 - DNA, 33 bp, Artificial Sequence
  Synthesized
gctcagcgtactcagttgtctttggatgctcag

SEQ ID NO: 7827 - DNA, 33 bp, Artificial Sequence
  Synthesized
gctcagcgtactcagtcttctaatatggctcag

SEQ ID NO: 7828 - DNA, 33 bp, Artificial Sequence
  Synthesized
gctcagcgtactcagtcttcttcttttgctcag

SEQ ID NO: 7829 - DNA, 33 bp, Artificial Sequence
  Synthesized
gctcagcgtactcgtgagtctaaggatgctcag

SEQ ID NO: 7830 - DNA, 33 bp, Artificial Sequence
  Synthesized
gctcagcgtacttctggtgcttctggtgctcag

SEQ ID NO: 7831 - DNA, 33 bp, Artificial Sequence
  Synthesized
gctcagcgtacttctcagattcagtctgctcag

SEQ ID NO: 7832 - DNA, 33 bp, Artificial Sequence
  Synthesized
gctcagcgtacttctactatgtctgctgctcag

SEQ ID NO: 7833 - DNA, 33 bp, Artificial Sequence
  Synthesized
gctcagcgtactactaatttggctactgctcag

SEQ ID NO: 7834 - DNA, 33 bp, Artificial Sequence
  Synthesized
gctcagcgtactactactaatgttcctgctcag

SEQ ID NO: 7835 - DNA, 33 bp, Artificial Sequence
  Synthesized
gctcagcgtactgttggttctgatttggctcag

SEQ ID NO: 7836 - DNA, 33 bp, Artificial Sequence
  Synthesized
gctcagcgtactgttaattctgttcctgctcag

SEQ ID NO: 7837 - DNA, 33 bp, Artificial Sequence
  Synthesized
gctcagcgtgttgctgcttctgatttggctcag

SEQ ID NO: 7838 - DNA, 33 bp, Artificial Sequence
  Synthesized
gctcagcgtgttgctcattctttgcctgctcag

SEQ ID NO: 7839 - DNA, 33 bp, Artificial Sequence
  Synthesized
gctcagcgtgttgcttctatgactcctgctcag

SEQ ID NO: 7840 - DNA, 33 bp, Artificial Sequence
  Synthesized
gctcagcgtgttgatcatcctcctactgctcag

SEQ ID NO: 7841 - DNA, 33 bp, Artificial Sequence
  Synthesized
gctcagcgtgttgaggagtcttcttatgctcag

SEQ ID NO: 7842 - DNA, 33 bp, Artificial Sequence
  Synthesized
gctcagcgtgttggtgatgctgaggttgctcag

SEQ ID NO: 7843 - DNA, 33 bp, Artificial Sequence
  Synthesized
gctcagcgtgttggtcctggttcttctgctcag

SEQ ID NO: 7844 - DNA, 33 bp, Artificial Sequence
  Synthesized
gctcagcgtgttggtccttctcctactgctcag

SEQ ID NO: 7845 - DNA, 33 bp, Artificial Sequence
  Synthesized
gctcagcgtgttcatgatacttctgctgctcag

SEQ ID NO: 7846 - DNA, 33 bp, Artificial Sequence
  Synthesized
gctcagcgtgttttgcagtctgatatggctcag

SEQ ID NO: 7847 - DNA, 33 bp, Artificial Sequence
  Synthesized
gctcagcgtgttatgcctgagaagattgctcag

SEQ ID NO: 7848 - DNA, 33 bp, Artificial Sequence
  Synthesized
gctcagcgtgttaatactcctgttactgctcag

SEQ ID NO: 7849 - DNA, 33 bp, Artificial Sequence
  Synthesized
gctcagcgtgttcctcagtcttttatggctcag

SEQ ID NO: 7850 - DNA, 33 bp, Artificial Sequence
  Synthesized
gctcagcgtgttcagaattctaatcctgctcag

SEQ ID NO: 7851 - DNA, 33 bp, Artificial Sequence
  Synthesized
gctcagcgtgttcgtttgggtgagcctgctcag

SEQ ID NO: 7852 - DNA, 33 bp, Artificial Sequence
  Synthesized
gctcagcgtgtttctaattctactgttgctcag

SEQ ID NO: 7853 - DNA, 33 bp, Artificial Sequence
  Synthesized
gctcagcgtgtttcttcttctgctcaggctcag

SEQ ID NO: 7854 - DNA, 33 bp, Artificial Sequence
  Synthesized
gctcagcgtgttactaaggatgagattgctcag

SEQ ID NO: 7855 - DNA, 33 bp, Artificial Sequence
  Synthesized
gctcagcgtgttactaagtctgatactgctcag

SEQ ID NO: 7856 - DNA, 33 bp, Artificial Sequence
  Synthesized
gctcagcgtgttacttctaatttggctgctcag

SEQ ID NO: 7857 - DNA, 33 bp, Artificial Sequence
  Synthesized
gctcagcgtgttgttggtgaggctgttgctcag

SEQ ID NO: 7858 - DNA, 33 bp, Artificial Sequence
  Synthesized
gctcagcgtgttgttaatccttcttctgctcag

SEQ ID NO: 7859 - DNA, 33 bp, Artificial Sequence
  Synthesized
gctcagcgtgttgtttcttctttgtctgctcag

SEQ ID NO: 7860 - DNA, 33 bp, Artificial Sequence
  Synthesized
gctcagcgttatgctggttcttttatggctcag

SEQ ID NO: 7861 - DNA, 33 bp, Artificial Sequence
  Synthesized
gctcagcgttatgctcattcttttatggctcag

SEQ ID NO: 7862 - DNA, 33 bp, Artificial Sequence
  Synthesized
gctcagcgttatttgcctggtgcttctgctcag

SEQ ID NO: 7863 - DNA, 33 bp, Artificial Sequence
  Synthesized
gctcagcgttatttgcctccttttggtgctcag

SEQ ID NO: 7864 - DNA, 33 bp, Artificial Sequence
  Synthesized
gctcagcgttatactatgtcttttatggctcag

SEQ ID NO: 7865 - DNA, 33 bp, Artificial Sequence
  Synthesized
gctcagtctgctgctaatcatgctcaggctcag

SEQ ID NO: 7866 - DNA, 33 bp, Artificial Sequence
  Synthesized
gctcagtctgctgctcgtacttctactgctcag

SEQ ID NO: 7867 - DNA, 33 bp, Artificial Sequence
  Synthesized
gctcagtctgctgcttctcgtcatcctgctcag

SEQ ID NO: 7868 - DNA, 33 bp, Artificial Sequence
  Synthesized
gctcagtctgctgatcgtcatactatggctcag

SEQ ID NO: 7869 - DNA, 33 bp, Artificial Sequence
  Synthesized
gctcagtctgctgagttgcgtaatttggctcag

SEQ ID NO: 7870 - DNA, 33 bp, Artificial Sequence
  Synthesized
gctcagtctgctggtattccttttcgtgctcag

SEQ ID NO: 7871 - DNA, 33 bp, Artificial Sequence
  Synthesized
gctcagtctgctggtattcgtcatcctgctcag

SEQ ID NO: 7872 - DNA, 33 bp, Artificial Sequence
  Synthesized
gctcagtctgctggtaagtctttgtatgctcag

SEQ ID NO: 7873 - DNA, 33 bp, Artificial Sequence
  Synthesized
gctcagtctgctcatcaggctcgtgctgctcag

SEQ ID NO: 7874 - DNA, 33 bp, Artificial Sequence
  Synthesized
gctcagtctgctattaatcgtcctcctgctcag

SEQ ID NO: 7875 - DNA, 33 bp, Artificial Sequence
  Synthesized
gctcagtctgctattacttctgttaatgctcag

SEQ ID NO: 7876 - DNA, 33 bp, Artificial Sequence
  Synthesized
gctcagtctgctttgcctcgtcctcaggctcag

SEQ ID NO: 7877 - DNA, 33 bp, Artificial Sequence
  Synthesized
gctcagtctgctttgtctgttaagcctgctcag

SEQ ID NO: 7878 - DNA, 33 bp, Artificial Sequence
  Synthesized
gctcagtctgctttgtatcagcagcaggctcag

SEQ ID NO: 7879 - DNA, 33 bp, Artificial Sequence
  Synthesized
gctcagtctgctatgggtcatcagtctgctcag

SEQ ID NO: 7880 - DNA, 33 bp, Artificial Sequence
  Synthesized
gctcagtctgctaataatcctaagatggctcag

SEQ ID NO: 7881 - DNA, 33 bp, Artificial Sequence
  Synthesized
gctcagtctgctccttctgatatgcgtgctcag

SEQ ID NO: 7882 - DNA, 33 bp, Artificial Sequence
  Synthesized
gctcagtctgctcctactactgctcgtgctcag

SEQ ID NO: 7883 - DNA, 33 bp, Artificial Sequence
  Synthesized
gctcagtctgctcgtactattacttctgctcag

SEQ ID NO: 7884 - DNA, 33 bp, Artificial Sequence
  Synthesized
gctcagtctgcttctggtcctactaatgctcag

SEQ ID NO: 7885 - DNA, 33 bp, Artificial Sequence
  Synthesized
gctcagtctgctactcgtactggtattgctcag

SEQ ID NO: 7886 - DNA, 33 bp, Artificial Sequence
  Synthesized
gctcagtctgctactactcgttctttggctcag

SEQ ID NO: 7887 - DNA, 33 bp, Artificial Sequence
  Synthesized
gctcagtctgctgttgctggtcgtatggctcag

SEQ ID NO: 7888 - DNA, 33 bp, Artificial Sequence
  Synthesized
gctcagtctgctgttattcgtactggtgctcag

SEQ ID NO: 7889 - DNA, 33 bp, Artificial Sequence
  Synthesized
gctcagtctgctgttaagactggtcaggctcag

SEQ ID NO: 7890 - DNA, 33 bp, Artificial Sequence
  Synthesized
gctcagtctgctgttaaggttgctcaggctcag

SEQ ID NO: 7891 - DNA, 33 bp, Artificial Sequence
  Synthesized
gctcagtctgctgttcctcctaagaatgctcag

SEQ ID NO: 7892 - DNA, 33 bp, Artificial Sequence
  Synthesized
gctcagtctgctgttcgttctgcttctgctcag

SEQ ID NO: 7893 - DNA, 33 bp, Artificial Sequence
  Synthesized
gctcagtctgatggtatgatttctaaggctcag

SEQ ID NO: 7894 - DNA, 33 bp, Artificial Sequence
  Synthesized
gctcagtctgatggtcgttatttgtctgctcag

SEQ ID NO: 7895 - DNA, 33 bp, Artificial Sequence
  Synthesized
gctcagtctgatcatcctgctaatactgctcag

SEQ ID NO: 7896 - DNA, 33 bp, Artificial Sequence
  Synthesized
gctcagtctgataagaagatgaattttgctcag

SEQ ID NO: 7897 - DNA, 33 bp, Artificial Sequence
  Synthesized
gctcagtctgataagcagtatcctttggctcag

SEQ ID NO: 7898 - DNA, 33 bp, Artificial Sequence
  Synthesized
gctcagtctgataatcatttgcagtctgctcag

SEQ ID NO: 7899 - DNA, 33 bp, Artificial Sequence
  Synthesized
gctcagtctgataatcctcgtcgtgctgctcag

SEQ ID NO: 7900 - DNA, 33 bp, Artificial Sequence
  Synthesized
gctcagtctgatcagaagtctactgctgctcag

SEQ ID NO: 7901 - DNA, 33 bp, Artificial Sequence
  Synthesized
gctcagtctgatcagcgtattcgttctgctcag

SEQ ID NO: 7902 - DNA, 33 bp, Artificial Sequence
  Synthesized
gctcagtctgatcgtttgactattaatgctcag

SEQ ID NO: 7903 - DNA, 33 bp, Artificial Sequence
  Synthesized
gctcagtctgatcgttctcgtgctatggctcag

SEQ ID NO: 7904 - DNA, 33 bp, Artificial Sequence
  Synthesized
gctcagtctgattcttttcatcctcaggctcag

SEQ ID NO: 7905 - DNA, 33 bp, Artificial Sequence
  Synthesized
gctcagtctgagcgtttgactaataatgctcag

SEQ ID NO: 7906 - DNA, 33 bp, Artificial Sequence
  Synthesized
gctcagtctgagcgttctgttcctaatgctcag

SEQ ID NO: 7907 - DNA, 33 bp, Artificial Sequence
  Synthesized
gctcagtctgagactgttcagtctattgctcag

SEQ ID NO: 7908 - DNA, 33 bp, Artificial Sequence
  Synthesized
gctcagtctgagtataatgttcgtactgctcag

SEQ ID NO: 7909 - DNA, 33 bp, Artificial Sequence
  Synthesized
gctcagtcttttgcttctttgactgctgctcag

SEQ ID NO: 7910 - DNA, 33 bp, Artificial Sequence
  Synthesized
gctcagtcttttggtcataagacttctgctcag

SEQ ID NO: 7911 - DNA, 33 bp, Artificial Sequence
  Synthesized
gctcagtcttttggtcagaatcgtgttgctcag

SEQ ID NO: 7912 - DNA, 33 bp, Artificial Sequence
  Synthesized
gctcagtcttttcattcttcttcttctgctcag

SEQ ID NO: 7913 - DNA, 33 bp, Artificial Sequence
  Synthesized
gctcagtcttttttgcctcctcataaggctcag

SEQ ID NO: 7914 - DNA, 33 bp, Artificial Sequence
  Synthesized
gctcagtcttttaatcagcagtctgctgctcag

SEQ ID NO: 7915 - DNA, 33 bp, Artificial Sequence
  Synthesized
gctcagtctttttctgctttgggtgctgctcag

SEQ ID NO: 7916 - DNA, 33 bp, Artificial Sequence
  Synthesized
gctcagtctttttcttctcgtttgcaggctcag

SEQ ID NO: 7917 - DNA, 33 bp, Artificial Sequence
  Synthesized
gctcagtctggtgctaatgttcgtaatgctcag

SEQ ID NO: 7918 - DNA, 33 bp, Artificial Sequence
  Synthesized
gctcagtctggtgctcaggctatgactgctcag

SEQ ID NO: 7919 - DNA, 33 bp, Artificial Sequence
  Synthesized
gctcagtctggtgattattcttttatggctcag

SEQ ID NO: 7920 - DNA, 33 bp, Artificial Sequence
  Synthesized
gctcagtctggtggtggttataagttggctcag

SEQ ID NO: 7921 - DNA, 33 bp, Artificial Sequence
  Synthesized
gctcagtctggtggtcgtcctatgattgctcag

SEQ ID NO: 7922 - DNA, 33 bp, Artificial Sequence
  Synthesized
gctcagtctggtggtactaagtctattgctcag

SEQ ID NO: 7923 - DNA, 33 bp, Artificial Sequence
  Synthesized
gctcagtctggtggtactcagtctaaggctcag

SEQ ID NO: 7924 - DNA, 33 bp, Artificial Sequence
  Synthesized
gctcagtctggtattaaggatatgcgtgctcag

SEQ ID NO: 7925 - DNA, 33 bp, Artificial Sequence
  Synthesized
gctcagtctggtattaagatgtcttctgctcag

SEQ ID NO: 7926 - DNA, 33 bp, Artificial Sequence
  Synthesized
gctcagtctggtatttctggtcagcgtgctcag

SEQ ID NO: 7927 - DNA, 33 bp, Artificial Sequence
  Synthesized
gctcagtctggtaaggctttgggttttgctcag

SEQ ID NO: 7928 - DNA, 33 bp, Artificial Sequence
  Synthesized
gctcagtctggtaagacttctttgttggctcag

SEQ ID NO: 7929 - DNA, 33 bp, Artificial Sequence
  Synthesized
gctcagtctggtttggctaatgagtctgctcag

SEQ ID NO: 7930 - DNA, 33 bp, Artificial Sequence
  Synthesized
gctcagtctggtttgggtactcctcgtgctcag

SEQ ID NO: 7931 - DNA, 33 bp, Artificial Sequence
  Synthesized
gctcagtctggtttgaattctttgactgctcag

SEQ ID NO: 7932 - DNA, 33 bp, Artificial Sequence
  Synthesized
gctcagtctggtttgcctttttttcgtgctcag

SEQ ID NO: 7933 - DNA, 33 bp, Artificial Sequence
  Synthesized
gctcagtctggtttgccttttaagcatgctcag

SEQ ID NO: 7934 - DNA, 33 bp, Artificial Sequence
  Synthesized
gctcagtctggtttgcctcgtactcgtgctcag

SEQ ID NO: 7935 - DNA, 33 bp, Artificial Sequence
  Synthesized
gctcagtctggtaatgatttgactaatgctcag

SEQ ID NO: 7936 - DNA, 33 bp, Artificial Sequence
  Synthesized
gctcagtctggtaatggtatgttgactgctcag

SEQ ID NO: 7937 - DNA, 33 bp, Artificial Sequence
  Synthesized
gctcagtctggtaatggtatgcgtattgctcag

SEQ ID NO: 7938 - DNA, 33 bp, Artificial Sequence
  Synthesized
gctcagtctggtaatcgttctggtgttgctcag

SEQ ID NO: 7939 - DNA, 33 bp, Artificial Sequence
  Synthesized
gctcagtctggtaattctttgactaaggctcag

SEQ ID NO: 7940 - DNA, 33 bp, Artificial Sequence
  Synthesized
gctcagtctggtaatactttgattcctgctcag

SEQ ID NO: 7941 - DNA, 33 bp, Artificial Sequence
  Synthesized
gctcagtctggtcctatgaataagatggctcag

SEQ ID NO: 7942 - DNA, 33 bp, Artificial Sequence
  Synthesized
gctcagtctggtcctcagttgtataaggctcag

SEQ ID NO: 7943 - DNA, 33 bp, Artificial Sequence
  Synthesized
gctcagtctggtcagactactcgtgatgctcag

SEQ ID NO: 7944 - DNA, 33 bp, Artificial Sequence
  Synthesized
gctcagtctggtcgtttggatcagcgtgctcag

SEQ ID NO: 7945 - DNA, 33 bp, Artificial Sequence
  Synthesized
gctcagtctggtcgtatgtctttggatgctcag

SEQ ID NO: 7946 - DNA, 33 bp, Artificial Sequence
  Synthesized
gctcagtctggtcgtacttctttggctgctcag

SEQ ID NO: 7947 - DNA, 33 bp, Artificial Sequence
  Synthesized
gctcagtctggtcgtgttcattctcctgctcag

SEQ ID NO: 7948 - DNA, 33 bp, Artificial Sequence
  Synthesized
gctcagtctggttctggttctcgtactgctcag

SEQ ID NO: 7949 - DNA, 33 bp, Artificial Sequence
  Synthesized
gctcagtctggttctattcgtcatttggctcag

SEQ ID NO: 7950 - DNA, 33 bp, Artificial Sequence
  Synthesized
gctcagtctggttctaagcctactattgctcag

SEQ ID NO: 7951 - DNA, 33 bp, Artificial Sequence
  Synthesized
gctcagtctggttctttgaagggtttggctcag

SEQ ID NO: 7952 - DNA, 33 bp, Artificial Sequence
  Synthesized
gctcagtctggttctaatttgactaaggctcag

SEQ ID NO: 7953 - DNA, 33 bp, Artificial Sequence
  Synthesized
gctcagtctggtactaagtctggtttggctcag

SEQ ID NO: 7954 - DNA, 33 bp, Artificial Sequence
  Synthesized
gctcagtctggtactatggctcgtcctgctcag

SEQ ID NO: 7955 - DNA, 33 bp, Artificial Sequence
  Synthesized
gctcagtctggtactatgttgcgtgatgctcag

SEQ ID NO: 7956 - DNA, 33 bp, Artificial Sequence
  Synthesized
gctcagtctggtactcagatgaatcctgctcag

SEQ ID NO: 7957 - DNA, 33 bp, Artificial Sequence
  Synthesized
gctcagtctggtgttaatttggctcgtgctcag

SEQ ID NO: 7958 - DNA, 33 bp, Artificial Sequence
  Synthesized
gctcagtctggtgtttctcagtattctgctcag

SEQ ID NO: 7959 - DNA, 33 bp, Artificial Sequence
  Synthesized
gctcagtctggtgtttctcgtgctgaggctcag

SEQ ID NO: 7960 - DNA, 33 bp, Artificial Sequence
  Synthesized
gctcagtctggttataagcctactgttgctcag

SEQ ID NO: 7961 - DNA, 33 bp, Artificial Sequence
  Synthesized
gctcagtctcatgctggtcatgttaatgctcag

SEQ ID NO: 7962 - DNA, 33 bp, Artificial Sequence
  Synthesized
gctcagtctcatcatgttgcttctaatgctcag

SEQ ID NO: 7963 - DNA, 33 bp, Artificial Sequence
  Synthesized
gctcagtctcatattgatacttctcgtgctcag

SEQ ID NO: 7964 - DNA, 33 bp, Artificial Sequence
  Synthesized
gctcagtctcataatcctgctgttgttgctcag

SEQ ID NO: 7965 - DNA, 33 bp, Artificial Sequence
  Synthesized
gctcagtctcatcaggagattcagcgtgctcag

SEQ ID NO: 7966 - DNA, 33 bp, Artificial Sequence
  Synthesized
gctcagtctcattctcctaatttgaaggctcag

SEQ ID NO: 7967 - DNA, 33 bp, Artificial Sequence
  Synthesized
gctcagtctcattcttatgataagaatgctcag

SEQ ID NO: 7968 - DNA, 33 bp, Artificial Sequence
  Synthesized
gctcagtctcatactcgttctgctatggctcag

SEQ ID NO: 7969 - DNA, 33 bp, Artificial Sequence
  Synthesized
gctcagtctcatactgttatgcatggtgctcag

SEQ ID NO: 7970 - DNA, 33 bp, Artificial Sequence
  Synthesized
gctcagtctcatgttttgcctcatcctgctcag

SEQ ID NO: 7971 - DNA, 33 bp, Artificial Sequence
  Synthesized
gctcagtctcattatcctaatggttctgctcag

SEQ ID NO: 7972 - DNA, 33 bp, Artificial Sequence
  Synthesized
gctcagtctattggtaatggtcaggctgctcag

SEQ ID NO: 7973 - DNA, 33 bp, Artificial Sequence
  Synthesized
gctcagtctattggtcaggctaagggtgctcag

SEQ ID NO: 7974 - DNA, 33 bp, Artificial Sequence
  Synthesized
gctcagtctattggtcgtaatcctgctgctcag

SEQ ID NO: 7975 - DNA, 33 bp, Artificial Sequence
  Synthesized
gctcagtctattggtcgttctgttactgctcag

SEQ ID NO: 7976 - DNA, 33 bp, Artificial Sequence
  Synthesized
gctcagtctattatgaagactcaggatgctcag

SEQ ID NO: 7977 - DNA, 33 bp, Artificial Sequence
  Synthesized
gctcagtctattaatttgcgtaatcaggctcag

SEQ ID NO: 7978 - DNA, 33 bp, Artificial Sequence
  Synthesized
gctcagtctattcctttgactacttctgctcag

SEQ ID NO: 7979 - DNA, 33 bp, Artificial Sequence
  Synthesized
gctcagtctattccttctgttaagattgctcag

SEQ ID NO: 7980 - DNA, 33 bp, Artificial Sequence
  Synthesized
gctcagtctatttctgctttggagatggctcag

SEQ ID NO: 7981 - DNA, 33 bp, Artificial Sequence
  Synthesized
gctcagtctattacttcttctatggttgctcag

SEQ ID NO: 7982 - DNA, 33 bp, Artificial Sequence
  Synthesized
gctcagtctattacttctactaaggatgctcag

SEQ ID NO: 7983 - DNA, 33 bp, Artificial Sequence
  Synthesized
gctcagtctattgttttgcctcagaatgctcag

SEQ ID NO: 7984 - DNA, 33 bp, Artificial Sequence
  Synthesized
gctcagtctattgtttcttctatgttggctcag

SEQ ID NO: 7985 - DNA, 33 bp, Artificial Sequence
  Synthesized
gctcagtctatttatgagattcgtcaggctcag

SEQ ID NO: 7986 - DNA, 33 bp, Artificial Sequence
  Synthesized
gctcagtctaaggcttttttttctgaggctcag

SEQ ID NO: 7987 - DNA, 33 bp, Artificial Sequence
  Synthesized
gctcagtctaaggatgctcctttgactgctcag

SEQ ID NO: 7988 - DNA, 33 bp, Artificial Sequence
  Synthesized
gctcagtctaaggatcgtttgcctttggctcag

SEQ ID NO: 7989 - DNA, 33 bp, Artificial Sequence
  Synthesized
gctcagtctaaggagtctactggtcgtgctcag

SEQ ID NO: 7990 - DNA, 33 bp, Artificial Sequence
  Synthesized
gctcagtctaagggtggtaataatactgctcag

SEQ ID NO: 7991 - DNA, 33 bp, Artificial Sequence
  Synthesized
gctcagtctaagggtcagcagttgtctgctcag

SEQ ID NO: 7992 - DNA, 33 bp, Artificial Sequence
  Synthesized
gctcagtctaagcatcagactattcctgctcag

SEQ ID NO: 7993 - DNA, 33 bp, Artificial Sequence
  Synthesized
gctcagtctaagattaatactggtaatgctcag

SEQ ID NO: 7994 - DNA, 33 bp, Artificial Sequence
  Synthesized
gctcagtctaagttggaggttactttggctcag

SEQ ID NO: 7995 - DNA, 33 bp, Artificial Sequence
  Synthesized
gctcagtctaagttgttgtcttctgatgctcag

SEQ ID NO: 7996 - DNA, 33 bp, Artificial Sequence
  Synthesized
gctcagtctaagttgcaggctgttgctgctcag

SEQ ID NO: 7997 - DNA, 33 bp, Artificial Sequence
  Synthesized
gctcagtctaagaatttgcctcatgttgctcag

SEQ ID NO: 7998 - DNA, 33 bp, Artificial Sequence
  Synthesized
gctcagtctaagcagattggtttgcaggctcag

SEQ ID NO: 7999 - DNA, 33 bp, Artificial Sequence
  Synthesized
gctcagtctaagcgttcttctgctatggctcag

SEQ ID NO: 8000 - DNA, 33 bp, Artificial Sequence
  Synthesized
gctcagtctaagtctcgttctcaggatgctcag

SEQ ID NO: 8001 - DNA, 33 bp, Artificial Sequence
  Synthesized
gctcagtctaagtctgttgttcctaatgctcag

SEQ ID NO: 8002 - DNA, 33 bp, Artificial Sequence
  Synthesized
gctcagtctaagactgctggtactattgctcag

SEQ ID NO: 8003 - DNA, 33 bp, Artificial Sequence
  Synthesized
gctcagtctaagacttcttctgttgttgctcag

SEQ ID NO: 8004 - DNA, 33 bp, Artificial Sequence
  Synthesized
gctcagtctaaggttcagatgccttctgctcag

SEQ ID NO: 8005 - DNA, 33 bp, Artificial Sequence
  Synthesized
gctcagtctaaggttacttctactcatgctcag

SEQ ID NO: 8006 - DNA, 33 bp, Artificial Sequence
  Synthesized
gctcagtctttggcttcttctgcttgggctcag

SEQ ID NO: 8007 - DNA, 33 bp, Artificial Sequence
  Synthesized
gctcagtctttggcttctactcctaaggctcag

SEQ ID NO: 8008 - DNA, 33 bp, Artificial Sequence
  Synthesized
gctcagtctttggatcctcagtctaaggctcag

SEQ ID NO: 8009 - DNA, 33 bp, Artificial Sequence
  Synthesized
gctcagtctttggatcgtaatcgtgctgctcag

SEQ ID NO: 8010 - DNA, 33 bp, Artificial Sequence
  Synthesized
gctcagtctttggagcatcctcgtcatgctcag

SEQ ID NO: 8011 - DNA, 33 bp, Artificial Sequence
  Synthesized
gctcagtctttggaggttactgctgatgctcag

SEQ ID NO: 8012 - DNA, 33 bp, Artificial Sequence
  Synthesized
gctcagtctttgggtttgtctgttaatgctcag

SEQ ID NO: 8013 - DNA, 33 bp, Artificial Sequence
  Synthesized
gctcagtctttgggtcgtttggattctgctcag

SEQ ID NO: 8014 - DNA, 33 bp, Artificial Sequence
  Synthesized
gctcagtctttgggttctcgtgctgctgctcag

SEQ ID NO: 8015 - DNA, 33 bp, Artificial Sequence
  Synthesized
gctcagtctttgggttctgtttctcaggctcag

SEQ ID NO: 8016 - DNA, 33 bp, Artificial Sequence
  Synthesized
gctcagtctttgcataattttccttctgctcag

SEQ ID NO: 8017 - DNA, 33 bp, Artificial Sequence
  Synthesized
gctcagtctttgcatgtttctggtttggctcag

SEQ ID NO: 8018 - DNA, 33 bp, Artificial Sequence
  Synthesized
gctcagtctttgaagttggattctcaggctcag

SEQ ID NO: 8019 - DNA, 33 bp, Artificial Sequence
  Synthesized
gctcagtctttgaagtcttctcgtgatgctcag

SEQ ID NO: 8020 - DNA, 33 bp, Artificial Sequence
  Synthesized
gctcagtctttgaagactatgttggaggctcag

SEQ ID NO: 8021 - DNA, 33 bp, Artificial Sequence
  Synthesized
gctcagtctttgttggattctactaaggctcag

SEQ ID NO: 8022 - DNA, 33 bp, Artificial Sequence
  Synthesized
gctcagtctttgttggaggctccttttgctcag

SEQ ID NO: 8023 - DNA, 33 bp, Artificial Sequence
  Synthesized
gctcagtctttgttgaattctactggtgctcag

SEQ ID NO: 8024 - DNA, 33 bp, Artificial Sequence
  Synthesized
gctcagtctttgatgaatgctacttctgctcag

SEQ ID NO: 8025 - DNA, 33 bp, Artificial Sequence
  Synthesized
gctcagtctttgatgactaagactggtgctcag

SEQ ID NO: 8026 - DNA, 33 bp, Artificial Sequence
  Synthesized
gctcagtctttgaatcattctcctttggctcag

SEQ ID NO: 8027 - DNA, 33 bp, Artificial Sequence
  Synthesized
gctcagtctttgaatcagtctgagtctgctcag

SEQ ID NO: 8028 - DNA, 33 bp, Artificial Sequence
  Synthesized
gctcagtctttgaatcgtactattcaggctcag

SEQ ID NO: 8029 - DNA, 33 bp, Artificial Sequence
  Synthesized
gctcagtctttgcctgctttggagttggctcag

SEQ ID NO: 8030 - DNA, 33 bp, Artificial Sequence
  Synthesized
gctcagtctttgcctacttctcgtggtgctcag

SEQ ID NO: 8031 - DNA, 33 bp, Artificial Sequence
  Synthesized
gctcagtctttgcagttgggtgctactgctcag

SEQ ID NO: 8032 - DNA, 33 bp, Artificial Sequence
  Synthesized
gctcagtctttgcagcgttctgaggatgctcag

SEQ ID NO: 8033 - DNA, 33 bp, Artificial Sequence
  Synthesized
gctcagtctttgcaggttactcgttctgctcag

SEQ ID NO: 8034 - DNA, 33 bp, Artificial Sequence
  Synthesized
gctcagtctttgcgttcttctgctgttgctcag

SEQ ID NO: 8035 - DNA, 33 bp, Artificial Sequence
  Synthesized
gctcagtctttgcgtactaatgaggctgctcag

SEQ ID NO: 8036 - DNA, 33 bp, Artificial Sequence
  Synthesized
gctcagtctttgcgtgttcctgcttctgctcag

SEQ ID NO: 8037 - DNA, 33 bp, Artificial Sequence
  Synthesized
gctcagtctttgtctggtcagggtaaggctcag

SEQ ID NO: 8038 - DNA, 33 bp, Artificial Sequence
  Synthesized
gctcagtctttgtctggttcttctcgtgctcag

SEQ ID NO: 8039 - DNA, 33 bp, Artificial Sequence
  Synthesized
gctcagtctttgtctaagaataattctgctcag

SEQ ID NO: 8040 - DNA, 33 bp, Artificial Sequence
  Synthesized
gctcagtctttgtctatgcctcgtgatgctcag

SEQ ID NO: 8041 - DNA, 33 bp, Artificial Sequence
  Synthesized
gctcagtctttgtctcctaagactcctgctcag

SEQ ID NO: 8042 - DNA, 33 bp, Artificial Sequence
  Synthesized
gctcagtctttgtctcgtcagcgtgatgctcag

SEQ ID NO: 8043 - DNA, 33 bp, Artificial Sequence
  Synthesized
gctcagtctttgtctcgttctgctactgctcag

SEQ ID NO: 8044 - DNA, 33 bp, Artificial Sequence
  Synthesized
gctcagtctttgtcttcttctcgtattgctcag

SEQ ID NO: 8045 - DNA, 33 bp, Artificial Sequence
  Synthesized
gctcagtctttgtctactcatatgaatgctcag

SEQ ID NO: 8046 - DNA, 33 bp, Artificial Sequence
  Synthesized
gctcagtctttgtctactattactggtgctcag

SEQ ID NO: 8047 - DNA, 33 bp, Artificial Sequence
  Synthesized
gctcagtctttgtcttatgcttcttctgctcag

SEQ ID NO: 8048 - DNA, 33 bp, Artificial Sequence
  Synthesized
gctcagtctttgactgatcctttgcgtgctcag

SEQ ID NO: 8049 - DNA, 33 bp, Artificial Sequence
  Synthesized
gctcagtctttgactaatgttaagactgctcag

SEQ ID NO: 8050 - DNA, 33 bp, Artificial Sequence
  Synthesized
gctcagtctttggttaaggctcctcaggctcag

SEQ ID NO: 8051 - DNA, 33 bp, Artificial Sequence
  Synthesized
gctcagtctttggttcgtaatggtactgctcag

SEQ ID NO: 8052 - DNA, 33 bp, Artificial Sequence
  Synthesized
gctcagtctttggttcgttctgattctgctcag

SEQ ID NO: 8053 - DNA, 33 bp, Artificial Sequence
  Synthesized
gctcagtctatggctaaggagtctgatgctcag

SEQ ID NO: 8054 - DNA, 33 bp, Artificial Sequence
  Synthesized
gctcagtctatggctaagatttcttctgctcag

SEQ ID NO: 8055 - DNA, 33 bp, Artificial Sequence
  Synthesized
gctcagtctatggctatgggtaagttggctcag

SEQ ID NO: 8056 - DNA, 33 bp, Artificial Sequence
  Synthesized
gctcagtctatgtgttctttgtctcaggctcag

SEQ ID NO: 8057 - DNA, 33 bp, Artificial Sequence
  Synthesized
gctcagtctatgggttcttcttctcgtgctcag

SEQ ID NO: 8058 - DNA, 33 bp, Artificial Sequence
  Synthesized
gctcagtctatgcatcagactgctggtgctcag

SEQ ID NO: 8059 - DNA, 33 bp, Artificial Sequence
  Synthesized
gctcagtctatgttggagtctgataaggctcag

SEQ ID NO: 8060 - DNA, 33 bp, Artificial Sequence
  Synthesized
gctcagtctatgcgtggtaatgttgttgctcag

SEQ ID NO: 8061 - DNA, 33 bp, Artificial Sequence
  Synthesized
gctcagtctatgtctttgcgtgattatgctcag

SEQ ID NO: 8062 - DNA, 33 bp, Artificial Sequence
  Synthesized
gctcagtctatgtctcgtggttcttatgctcag

SEQ ID NO: 8063 - DNA, 33 bp, Artificial Sequence
  Synthesized
gctcagtctatgtctcgttcttctgttgctcag

SEQ ID NO: 8064 - DNA, 33 bp, Artificial Sequence
  Synthesized
gctcagtctatgtcttctaatttgactgctcag

SEQ ID NO: 8065 - DNA, 33 bp, Artificial Sequence
  Synthesized
gctcagtctatgtcttctcctcgtgctgctcag

SEQ ID NO: 8066 - DNA, 33 bp, Artificial Sequence
  Synthesized
gctcagtctatgtcttcttctcgtgctgctcag

SEQ ID NO: 8067 - DNA, 33 bp, Artificial Sequence
  Synthesized
gctcagtctatgtcttctgttcataatgctcag

SEQ ID NO: 8068 - DNA, 33 bp, Artificial Sequence
  Synthesized
gctcagtctatgtctactcgtattgctgctcag

SEQ ID NO: 8069 - DNA, 33 bp, Artificial Sequence
  Synthesized
gctcagtctatgactcgtaatactgttgctcag

SEQ ID NO: 8070 - DNA, 33 bp, Artificial Sequence
  Synthesized
gctcagtctatgactcgttctgttactgctcag

SEQ ID NO: 8071 - DNA, 33 bp, Artificial Sequence
  Synthesized
gctcagtctatgactacttctcgtcctgctcag

SEQ ID NO: 8072 - DNA, 33 bp, Artificial Sequence
  Synthesized
gctcagtctatggttggtgagcgttttgctcag

SEQ ID NO: 8073 - DNA, 33 bp, Artificial Sequence
  Synthesized
gctcagtctaatgctcgttcttctttggctcag

SEQ ID NO: 8074 - DNA, 33 bp, Artificial Sequence
  Synthesized
gctcagtctaatgatactcgtaagcgtgctcag

SEQ ID NO: 8075 - DNA, 33 bp, Artificial Sequence
  Synthesized
gctcagtctaattttcataatactactgctcag

SEQ ID NO: 8076 - DNA, 33 bp, Artificial Sequence
  Synthesized
gctcagtctaattttaatcgtactggtgctcag

SEQ ID NO: 8077 - DNA, 33 bp, Artificial Sequence
  Synthesized
gctcagtctaatcataatgttaatactgctcag

SEQ ID NO: 8078 - DNA, 33 bp, Artificial Sequence
  Synthesized
gctcagtctaatattaagtattctcctgctcag

SEQ ID NO: 8079 - DNA, 33 bp, Artificial Sequence
  Synthesized
gctcagtctaatattcgtaataatactgctcag

SEQ ID NO: 8080 - DNA, 33 bp, Artificial Sequence
  Synthesized
gctcagtctaatattactcgtaataatgctcag

SEQ ID NO: 8081 - DNA, 33 bp, Artificial Sequence
  Synthesized
gctcagtctaataagttgcatacttctgctcag

SEQ ID NO: 8082 - DNA, 33 bp, Artificial Sequence
  Synthesized
gctcagtctaataagactcgtatttttgctcag

SEQ ID NO: 8083 - DNA, 33 bp, Artificial Sequence
  Synthesized
gctcagtctaataagactcgtactgctgctcag

SEQ ID NO: 8084 - DNA, 33 bp, Artificial Sequence
  Synthesized
gctcagtctaatttgaatactcgtggtgctcag

SEQ ID NO: 8085 - DNA, 33 bp, Artificial Sequence
  Synthesized
gctcagtctaatttgcctcctcctgctgctcag

SEQ ID NO: 8086 - DNA, 33 bp, Artificial Sequence
  Synthesized
gctcagtctaatttgcgtttgaatcctgctcag

SEQ ID NO: 8087 - DNA, 33 bp, Artificial Sequence
  Synthesized
gctcagtctaatttgactcgttctaatgctcag

SEQ ID NO: 8088 - DNA, 33 bp, Artificial Sequence
  Synthesized
gctcagtctaatatgcatcagttgactgctcag

SEQ ID NO: 8089 - DNA, 33 bp, Artificial Sequence
  Synthesized
gctcagtctaatatgactcgtcctgctgctcag

SEQ ID NO: 8090 - DNA, 33 bp, Artificial Sequence
  Synthesized
gctcagtctaataatacttttaagcctgctcag

SEQ ID NO: 8091 - DNA, 33 bp, Artificial Sequence
  Synthesized
gctcagtctaataatactggtgagcctgctcag

SEQ ID NO: 8092 - DNA, 33 bp, Artificial Sequence
  Synthesized
gctcagtctaataatactattgagtttgctcag

SEQ ID NO: 8093 - DNA, 33 bp, Artificial Sequence
  Synthesized
gctcagtctaataatactccttcttttgctcag

SEQ ID NO: 8094 - DNA, 33 bp, Artificial Sequence
  Synthesized
gctcagtctaataatactactcgttctgctcag

SEQ ID NO: 8095 - DNA, 33 bp, Artificial Sequence
  Synthesized
gctcagtctaatcctggtcctttgtctgctcag

SEQ ID NO: 8096 - DNA, 33 bp, Artificial Sequence
  Synthesized
gctcagtctaatcctttgactgtttctgctcag

SEQ ID NO: 8097 - DNA, 33 bp, Artificial Sequence
  Synthesized
gctcagtctaatcctatgcgtactcctgctcag

SEQ ID NO: 8098 - DNA, 33 bp, Artificial Sequence
  Synthesized
gctcagtctaatcctccttatgagtctgctcag

SEQ ID NO: 8099 - DNA, 33 bp, Artificial Sequence
  Synthesized
gctcagtctaatcctgtttttcgttctgctcag

SEQ ID NO: 8100 - DNA, 33 bp, Artificial Sequence
  Synthesized
gctcagtctaatcctgttcatcgttctgctcag

SEQ ID NO: 8101 - DNA, 33 bp, Artificial Sequence
  Synthesized
gctcagtctaatcctgttcgttctaatgctcag

SEQ ID NO: 8102 - DNA, 33 bp, Artificial Sequence
  Synthesized
gctcagtctaatccttattctgcttctgctcag

SEQ ID NO: 8103 - DNA, 33 bp, Artificial Sequence
  Synthesized
gctcagtctaatcagttgcgtggtaatgctcag

SEQ ID NO: 8104 - DNA, 33 bp, Artificial Sequence
  Synthesized
gctcagtctaatcgtaatgtttatgatgctcag

SEQ ID NO: 8105 - DNA, 33 bp, Artificial Sequence
  Synthesized
gctcagtctaatcgtcaggctggtatggctcag

SEQ ID NO: 8106 - DNA, 33 bp, Artificial Sequence
  Synthesized
gctcagtctaatcgttctggtcctgttgctcag

SEQ ID NO: 8107 - DNA, 33 bp, Artificial Sequence
  Synthesized
gctcagtctaatcgtgtttcttctttggctcag

SEQ ID NO: 8108 - DNA, 33 bp, Artificial Sequence
  Synthesized
gctcagtctaattctcctttgatgggtgctcag

SEQ ID NO: 8109 - DNA, 33 bp, Artificial Sequence
  Synthesized
gctcagtctaattctactaaggttactgctcag

SEQ ID NO: 8110 - DNA, 33 bp, Artificial Sequence
  Synthesized
gctcagtctaattctgttaagattactgctcag

SEQ ID NO: 8111 - DNA, 33 bp, Artificial Sequence
  Synthesized
gctcagtctaattctgttaagatgtctgctcag

SEQ ID NO: 8112 - DNA, 33 bp, Artificial Sequence
  Synthesized
gctcagtctaattctgttaagtcttttgctcag

SEQ ID NO: 8113 - DNA, 33 bp, Artificial Sequence
  Synthesized
gctcagtctaattctgttaagactgttgctcag

SEQ ID NO: 8114 - DNA, 33 bp, Artificial Sequence
  Synthesized
gctcagtctaattctgttcctgatttggctcag

SEQ ID NO: 8115 - DNA, 33 bp, Artificial Sequence
  Synthesized
gctcagtctaatactggtgctttgtctgctcag

SEQ ID NO: 8116 - DNA, 33 bp, Artificial Sequence
  Synthesized
gctcagtctaatactaagttgtctttggctcag

SEQ ID NO: 8117 - DNA, 33 bp, Artificial Sequence
  Synthesized
gctcagtctaatactaatgttaagtatgctcag

SEQ ID NO: 8118 - DNA, 33 bp, Artificial Sequence
  Synthesized
gctcagtctaatactactaagccttatgctcag

SEQ ID NO: 8119 - DNA, 33 bp, Artificial Sequence
  Synthesized
gctcagtctaatactgttaaggctatggctcag

SEQ ID NO: 8120 - DNA, 33 bp, Artificial Sequence
  Synthesized
gctcagtctaatgttactttgtctgatgctcag

SEQ ID NO: 8121 - DNA, 33 bp, Artificial Sequence
  Synthesized
gctcagtctaatgttactcgtcatggtgctcag

SEQ ID NO: 8122 - DNA, 33 bp, Artificial Sequence
  Synthesized
gctcagtctaatgttactcgtccttctgctcag

SEQ ID NO: 8123 - DNA, 33 bp, Artificial Sequence
  Synthesized
gctcagtctaattatggtactggtatggctcag

SEQ ID NO: 8124 - DNA, 33 bp, Artificial Sequence
  Synthesized
gctcagtctaattatactcgtcctcctgctcag

SEQ ID NO: 8125 - DNA, 33 bp, Artificial Sequence
  Synthesized
gctcagtctaattatactcgtcgtggtgctcag

SEQ ID NO: 8126 - DNA, 33 bp, Artificial Sequence
  Synthesized
gctcagtctcctgctcataagtctggtgctcag

SEQ ID NO: 8127 - DNA, 33 bp, Artificial Sequence
  Synthesized
gctcagtctcctgctactttgcatgatgctcag

SEQ ID NO: 8128 - DNA, 33 bp, Artificial Sequence
  Synthesized
gctcagtctcctcatcgtaatggtgttgctcag

SEQ ID NO: 8129 - DNA, 33 bp, Artificial Sequence
  Synthesized
gctcagtctcctaagatggctaatactgctcag

SEQ ID NO: 8130 - DNA, 33 bp, Artificial Sequence
  Synthesized
gctcagtctcctttgcctcattatcctgctcag

SEQ ID NO: 8131 - DNA, 33 bp, Artificial Sequence
  Synthesized
gctcagtctcctttgcctcctattgatgctcag

SEQ ID NO: 8132 - DNA, 33 bp, Artificial Sequence
  Synthesized
gctcagtctcctttgcctcgtcgttttgctcag

SEQ ID NO: 8133 - DNA, 33 bp, Artificial Sequence
  Synthesized
gctcagtctcctttgcctcgtactcctgctcag

SEQ ID NO: 8134 - DNA, 33 bp, Artificial Sequence
  Synthesized
gctcagtctcctttgcagttgttgtctgctcag

SEQ ID NO: 8135 - DNA, 33 bp, Artificial Sequence
  Synthesized
gctcagtctcctaatatgtatcgtcctgctcag

SEQ ID NO: 8136 - DNA, 33 bp, Artificial Sequence
  Synthesized
gctcagtctcctcctactttggctcctgctcag

SEQ ID NO: 8137 - DNA, 33 bp, Artificial Sequence
  Synthesized
gctcagtctcctcgtcaggctgatttggctcag

SEQ ID NO: 8138 - DNA, 33 bp, Artificial Sequence
  Synthesized
gctcagtctcctcgtcagactactactgctcag

SEQ ID NO: 8139 - DNA, 33 bp, Artificial Sequence
  Synthesized
gctcagtctccttctattaagaatcctgctcag

SEQ ID NO: 8140 - DNA, 33 bp, Artificial Sequence
  Synthesized
gctcagtctccttctcgtgctcctcaggctcag

SEQ ID NO: 8141 - DNA, 33 bp, Artificial Sequence
  Synthesized
gctcagtctccttcttctactgctcgtgctcag

SEQ ID NO: 8142 - DNA, 33 bp, Artificial Sequence
  Synthesized
gctcagtctcctactgaggctcgtaaggctcag

SEQ ID NO: 8143 - DNA, 33 bp, Artificial Sequence
  Synthesized
gctcagtctcctactcgtgctaatcaggctcag

SEQ ID NO: 8144 - DNA, 33 bp, Artificial Sequence
  Synthesized
gctcagtctcctactcgttctgctatggctcag

SEQ ID NO: 8145 - DNA, 33 bp, Artificial Sequence
  Synthesized
gctcagtctcctactcgttctgttggtgctcag

SEQ ID NO: 8146 - DNA, 33 bp, Artificial Sequence
  Synthesized
gctcagtctcctgttcctactcatcgtgctcag

SEQ ID NO: 8147 - DNA, 33 bp, Artificial Sequence
  Synthesized
gctcagtctcaggctaagaataataatgctcag

SEQ ID NO: 8148 - DNA, 33 bp, Artificial Sequence
  Synthesized
gctcagtctcaggcttctggtatgttggctcag

SEQ ID NO: 8149 - DNA, 33 bp, Artificial Sequence
  Synthesized
gctcagtctcaggagcctcgtactggtgctcag

SEQ ID NO: 8150 - DNA, 33 bp, Artificial Sequence
  Synthesized
gctcagtctcagtttactcgttctactgctcag

SEQ ID NO: 8151 - DNA, 33 bp, Artificial Sequence
  Synthesized
gctcagtctcagggtaatttgcgttatgctcag

SEQ ID NO: 8152 - DNA, 33 bp, Artificial Sequence
  Synthesized
gctcagtctcagatttctgcttcttctgctcag

SEQ ID NO: 8153 - DNA, 33 bp, Artificial Sequence
  Synthesized
gctcagtctcagaagaagttgatgcctgctcag

SEQ ID NO: 8154 - DNA, 33 bp, Artificial Sequence
  Synthesized
gctcagtctcagttgggttctttgggtgctcag

SEQ ID NO: 8155 - DNA, 33 bp, Artificial Sequence
  Synthesized
gctcagtctcagttgaagaattctgttgctcag

SEQ ID NO: 8156 - DNA, 33 bp, Artificial Sequence
  Synthesized
gctcagtctcagttgcctcagcgtactgctcag

SEQ ID NO: 8157 - DNA, 33 bp, Artificial Sequence
  Synthesized
gctcagtctcagttgccttctcgtaaggctcag

SEQ ID NO: 8158 - DNA, 33 bp, Artificial Sequence
  Synthesized
gctcagtctcagttgtctgttactaaggctcag

SEQ ID NO: 8159 - DNA, 33 bp, Artificial Sequence
  Synthesized
gctcagtctcagatgcagcctaaggttgctcag

SEQ ID NO: 8160 - DNA, 33 bp, Artificial Sequence
  Synthesized
gctcagtctcagatgtctaattctaatgctcag

SEQ ID NO: 8161 - DNA, 33 bp, Artificial Sequence
  Synthesized
gctcagtctcagaataagttgcctactgctcag

SEQ ID NO: 8162 - DNA, 33 bp, Artificial Sequence
  Synthesized
gctcagtctcagaatttgggtattcaggctcag

SEQ ID NO: 8163 - DNA, 33 bp, Artificial Sequence
  Synthesized
gctcagtctcagcctcctattggtaatgctcag

SEQ ID NO: 8164 - DNA, 33 bp, Artificial Sequence
  Synthesized
gctcagtctcagcgtgagcctttgcgtgctcag

SEQ ID NO: 8165 - DNA, 33 bp, Artificial Sequence
  Synthesized
gctcagtctcagcgtgagcgttcttttgctcag

SEQ ID NO: 8166 - DNA, 33 bp, Artificial Sequence
  Synthesized
gctcagtctcagcgtttgatggctgatgctcag

SEQ ID NO: 8167 - DNA, 33 bp, Artificial Sequence
  Synthesized
gctcagtctcagcgttctaaggagactgctcag

SEQ ID NO: 8168 - DNA, 33 bp, Artificial Sequence
  Synthesized
gctcagtctcagtctgctttggctcctgctcag

SEQ ID NO: 8169 - DNA, 33 bp, Artificial Sequence
  Synthesized
gctcagtctcagtctatgcctaagaatgctcag

SEQ ID NO: 8170 - DNA, 33 bp, Artificial Sequence
  Synthesized
gctcagtctcagactcatattcctaatgctcag

SEQ ID NO: 8171 - DNA, 33 bp, Artificial Sequence
  Synthesized
gctcagtctcagactttgacttctgatgctcag

SEQ ID NO: 8172 - DNA, 33 bp, Artificial Sequence
  Synthesized
gctcagtctcagactcagtctcgtcaggctcag

SEQ ID NO: 8173 - DNA, 33 bp, Artificial Sequence
  Synthesized
gctcagtctcagactcgtactttgcctgctcag

SEQ ID NO: 8174 - DNA, 33 bp, Artificial Sequence
  Synthesized
gctcagtctcaggttggtcgtttgcctgctcag

SEQ ID NO: 8175 - DNA, 33 bp, Artificial Sequence
  Synthesized
gctcagtctcaggttaagaatactgctgctcag

SEQ ID NO: 8176 - DNA, 33 bp, Artificial Sequence
  Synthesized
gctcagtctcgtgctttgtctggtaatgctcag

SEQ ID NO: 8177 - DNA, 33 bp, Artificial Sequence
  Synthesized
gctcagtctcgtgctgtttctgatattgctcag

SEQ ID NO: 8178 - DNA, 33 bp, Artificial Sequence
  Synthesized
gctcagtctcgtgatatgtctcctcaggctcag

SEQ ID NO: 8179 - DNA, 33 bp, Artificial Sequence
  Synthesized
gctcagtctcgtgagcgtatgtctgctgctcag

SEQ ID NO: 8180 - DNA, 33 bp, Artificial Sequence
  Synthesized
gctcagtctcgtgagcgttctttgttggctcag

SEQ ID NO: 8181 - DNA, 33 bp, Artificial Sequence
  Synthesized
gctcagtctcgtggtggtttggtttctgctcag

SEQ ID NO: 8182 - DNA, 33 bp, Artificial Sequence
  Synthesized
gctcagtctcgtggtcatgagactcaggctcag

SEQ ID NO: 8183 - DNA, 33 bp, Artificial Sequence
  Synthesized
gctcagtctcgtggtttgtctgctatggctcag

SEQ ID NO: 8184 - DNA, 33 bp, Artificial Sequence
  Synthesized
gctcagtctcgtggtccttcttttatggctcag

SEQ ID NO: 8185 - DNA, 33 bp, Artificial Sequence
  Synthesized
gctcagtctcgtggttctgtttctcctgctcag

SEQ ID NO: 8186 - DNA, 33 bp, Artificial Sequence
  Synthesized
gctcagtctcgtattgctcctgcttctgctcag

SEQ ID NO: 8187 - DNA, 33 bp, Artificial Sequence
  Synthesized
gctcagtctcgtatttttccttctgctgctcag

SEQ ID NO: 8188 - DNA, 33 bp, Artificial Sequence
  Synthesized
gctcagtctcgtattccttcttctgttgctcag

SEQ ID NO: 8189 - DNA, 33 bp, Artificial Sequence
  Synthesized
gctcagtctcgtaaggagatggatcaggctcag

SEQ ID NO: 8190 - DNA, 33 bp, Artificial Sequence
  Synthesized
gctcagtctcgtttggctactactgctgctcag

SEQ ID NO: 8191 - DNA, 33 bp, Artificial Sequence
  Synthesized
gctcagtctcgtttggatttggaggttgctcag

SEQ ID NO: 8192 - DNA, 33 bp, Artificial Sequence
  Synthesized
gctcagtctcgtttggaggctcgttctgctcag

SEQ ID NO: 8193 - DNA, 33 bp, Artificial Sequence
  Synthesized
gctcagtctcgtttggagcgtgctcaggctcag

SEQ ID NO: 8194 - DNA, 33 bp, Artificial Sequence
  Synthesized
gctcagtctcgtttgcatgctgctaatgctcag

SEQ ID NO: 8195 - DNA, 33 bp, Artificial Sequence
  Synthesized
gctcagtctcgtttgttggatcatattgctcag

SEQ ID NO: 8196 - DNA, 33 bp, Artificial Sequence
  Synthesized
gctcagtctcgtttgccttttggtggtgctcag

SEQ ID NO: 8197 - DNA, 33 bp, Artificial Sequence
  Synthesized
gctcagtctcgtttgcctcgttttcgtgctcag

SEQ ID NO: 8198 - DNA, 33 bp, Artificial Sequence
  Synthesized
gctcagtctcgtttgcctcgtaaggaggctcag

SEQ ID NO: 8199 - DNA, 33 bp, Artificial Sequence
  Synthesized
gctcagtctcgtttggtttcttctaatgctcag

SEQ ID NO: 8200 - DNA, 33 bp, Artificial Sequence
  Synthesized
gctcagtctcgtttggttactactggtgctcag

SEQ ID NO: 8201 - DNA, 33 bp, Artificial Sequence
  Synthesized
gctcagtctcgtatggctgatacttctgctcag

SEQ ID NO: 8202 - DNA, 33 bp, Artificial Sequence
  Synthesized
gctcagtctcgtatgtcttctaatgctgctcag

SEQ ID NO: 8203 - DNA, 33 bp, Artificial Sequence
  Synthesized
gctcagtctcgtatgactcctcagactgctcag

SEQ ID NO: 8204 - DNA, 33 bp, Artificial Sequence
  Synthesized
gctcagtctcgtaatgctgttactcctgctcag

SEQ ID NO: 8205 - DNA, 33 bp, Artificial Sequence
  Synthesized
gctcagtctcgtaatttggtttctaatgctcag

SEQ ID NO: 8206 - DNA, 33 bp, Artificial Sequence
  Synthesized
gctcagtctcgtaatcaggctggttctgctcag

SEQ ID NO: 8207 - DNA, 33 bp, Artificial Sequence
  Synthesized
gctcagtctcgtaatgttacttctgctgctcag

SEQ ID NO: 8208 - DNA, 33 bp, Artificial Sequence
  Synthesized
gctcagtctcgtcctaataatttgactgctcag

SEQ ID NO: 8209 - DNA, 33 bp, Artificial Sequence
  Synthesized
gctcagtctcgtcagcagcctcctttggctcag

SEQ ID NO: 8210 - DNA, 33 bp, Artificial Sequence
  Synthesized
gctcagtctcgtcgtgatactttgactgctcag

SEQ ID NO: 8211 - DNA, 33 bp, Artificial Sequence
  Synthesized
gctcagtctcgtcgtgatgttgatatggctcag

SEQ ID NO: 8212 - DNA, 33 bp, Artificial Sequence
  Synthesized
gctcagtctcgttctggtactgctttggctcag

SEQ ID NO: 8213 - DNA, 33 bp, Artificial Sequence
  Synthesized
gctcagtctcgttctatgactgatgttgctcag

SEQ ID NO: 8214 - DNA, 33 bp, Artificial Sequence
  Synthesized
gctcagtctcgttctcctttgcctcatgctcag

SEQ ID NO: 8215 - DNA, 33 bp, Artificial Sequence
  Synthesized
gctcagtctcgttctcagtatactgctgctcag

SEQ ID NO: 8216 - DNA, 33 bp, Artificial Sequence
  Synthesized
gctcagtctcgttcttctgctttgtctgctcag

SEQ ID NO: 8217 - DNA, 33 bp, Artificial Sequence
  Synthesized
gctcagtctcgttcttctgaggctcctgctcag

SEQ ID NO: 8218 - DNA, 33 bp, Artificial Sequence
  Synthesized
gctcagtctcgtactactttggctgatgctcag

SEQ ID NO: 8219 - DNA, 33 bp, Artificial Sequence
  Synthesized
gctcagtctcgtgttaataatcagggtgctcag

SEQ ID NO: 8220 - DNA, 33 bp, Artificial Sequence
  Synthesized
gctcagtctcgtgttcagccttctcaggctcag

SEQ ID NO: 8221 - DNA, 33 bp, Artificial Sequence
  Synthesized
gctcagtctcgtgtttcttctactcctgctcag

SEQ ID NO: 8222 - DNA, 33 bp, Artificial Sequence
  Synthesized
gctcagtcttctgctgctaatcgtgctgctcag

SEQ ID NO: 8223 - DNA, 33 bp, Artificial Sequence
  Synthesized
gctcagtcttctgctggtcatcctaatgctcag

SEQ ID NO: 8224 - DNA, 33 bp, Artificial Sequence
  Synthesized
gctcagtcttctgctcatttgtctactgctcag

SEQ ID NO: 8225 - DNA, 33 bp, Artificial Sequence
  Synthesized
gctcagtcttctgctcatactccttctgctcag

SEQ ID NO: 8226 - DNA, 33 bp, Artificial Sequence
  Synthesized
gctcagtcttctgctatgcgtcgtgatgctcag

SEQ ID NO: 8227 - DNA, 33 bp, Artificial Sequence
  Synthesized
gctcagtcttctgctcagcagggttatgctcag

SEQ ID NO: 8228 - DNA, 33 bp, Artificial Sequence
  Synthesized
gctcagtcttctgctcgtggtattgctgctcag

SEQ ID NO: 8229 - DNA, 33 bp, Artificial Sequence
  Synthesized
gctcagtcttctgctcgtcctggttatgctcag

SEQ ID NO: 8230 - DNA, 33 bp, Artificial Sequence
  Synthesized
gctcagtcttctgcttcttttcctgttgctcag

SEQ ID NO: 8231 - DNA, 33 bp, Artificial Sequence
  Synthesized
gctcagtcttctgcttctcgtgctaatgctcag

SEQ ID NO: 8232 - DNA, 33 bp, Artificial Sequence
  Synthesized
gctcagtcttctgcttctcgtactactgctcag

SEQ ID NO: 8233 - DNA, 33 bp, Artificial Sequence
  Synthesized
gctcagtcttctgatggttctcatactgctcag

SEQ ID NO: 8234 - DNA, 33 bp, Artificial Sequence
  Synthesized
gctcagtcttctgatactgctcgtgttgctcag

SEQ ID NO: 8235 - DNA, 33 bp, Artificial Sequence
  Synthesized
gctcagtcttctgatactcgtatgcgtgctcag

SEQ ID NO: 8236 - DNA, 33 bp, Artificial Sequence
  Synthesized
gctcagtcttctggtattcagcagcgtgctcag

SEQ ID NO: 8237 - DNA, 33 bp, Artificial Sequence
  Synthesized
gctcagtcttctggtatttctcgtgatgctcag

SEQ ID NO: 8238 - DNA, 33 bp, Artificial Sequence
  Synthesized
gctcagtcttctggtaagttggttttggctcag

SEQ ID NO: 8239 - DNA, 33 bp, Artificial Sequence
  Synthesized
gctcagtcttctggtatgaatcctgttgctcag

SEQ ID NO: 8240 - DNA, 33 bp, Artificial Sequence
  Synthesized
gctcagtcttctggtcagcatgttgctgctcag

SEQ ID NO: 8241 - DNA, 33 bp, Artificial Sequence
  Synthesized
gctcagtcttctggtcgtcctttgcaggctcag

SEQ ID NO: 8242 - DNA, 33 bp, Artificial Sequence
  Synthesized
gctcagtcttctggttcttcttattctgctcag

SEQ ID NO: 8243 - DNA, 33 bp, Artificial Sequence
  Synthesized
gctcagtcttctcatattaagggtcatgctcag

SEQ ID NO: 8244 - DNA, 33 bp, Artificial Sequence
  Synthesized
gctcagtcttctattggtcgtggtttggctcag

SEQ ID NO: 8245 - DNA, 33 bp, Artificial Sequence
  Synthesized
gctcagtcttctattattcgtgagtctgctcag

SEQ ID NO: 8246 - DNA, 33 bp, Artificial Sequence
  Synthesized
gctcagtcttctaagttgcctgttttggctcag

SEQ ID NO: 8247 - DNA, 33 bp, Artificial Sequence
  Synthesized
gctcagtcttctaagtctgagcctatggctcag

SEQ ID NO: 8248 - DNA, 33 bp, Artificial Sequence
  Synthesized
gctcagtcttctaagtctggttctaatgctcag

SEQ ID NO: 8249 - DNA, 33 bp, Artificial Sequence
  Synthesized
gctcagtcttctttggagaagggtcctgctcag

SEQ ID NO: 8250 - DNA, 33 bp, Artificial Sequence
  Synthesized
gctcagtcttctttgggttatggtttggctcag

SEQ ID NO: 8251 - DNA, 33 bp, Artificial Sequence
  Synthesized
gctcagtcttctttgcatcagaagactgctcag

SEQ ID NO: 8252 - DNA, 33 bp, Artificial Sequence
  Synthesized
gctcagtcttctttgcaggctactcgtgctcag

SEQ ID NO: 8253 - DNA, 33 bp, Artificial Sequence
  Synthesized
gctcagtcttctttgcagatgcagcatgctcag

SEQ ID NO: 8254 - DNA, 33 bp, Artificial Sequence
  Synthesized
gctcagtcttctttgcgttctactcctgctcag

SEQ ID NO: 8255 - DNA, 33 bp, Artificial Sequence
  Synthesized
gctcagtcttctttgtctactgttaaggctcag

SEQ ID NO: 8256 - DNA, 33 bp, Artificial Sequence
  Synthesized
gctcagtcttctttgactcctaaggctgctcag

SEQ ID NO: 8257 - DNA, 33 bp, Artificial Sequence
  Synthesized
gctcagtcttctttggttcagtctatggctcag

SEQ ID NO: 8258 - DNA, 33 bp, Artificial Sequence
  Synthesized
gctcagtcttctatgtctttggtttctgctcag

SEQ ID NO: 8259 - DNA, 33 bp, Artificial Sequence
  Synthesized
gctcagtcttctatgactgttcctttggctcag

SEQ ID NO: 8260 - DNA, 33 bp, Artificial Sequence
  Synthesized
gctcagtcttctaataagttgtctactgctcag

SEQ ID NO: 8261 - DNA, 33 bp, Artificial Sequence
  Synthesized
gctcagtcttctaatttgactaatttggctcag

SEQ ID NO: 8262 - DNA, 33 bp, Artificial Sequence
  Synthesized
gctcagtcttctaatcgtgctactgttgctcag

SEQ ID NO: 8263 - DNA, 33 bp, Artificial Sequence
  Synthesized
gctcagtcttctaatgttggtttgcgtgctcag

SEQ ID NO: 8264 - DNA, 33 bp, Artificial Sequence
  Synthesized
gctcagtcttctaattatgctactcctgctcag

SEQ ID NO: 8265 - DNA, 33 bp, Artificial Sequence
  Synthesized
gctcagtcttctcctgcttctggtaaggctcag

SEQ ID NO: 8266 - DNA, 33 bp, Artificial Sequence
  Synthesized
gctcagtcttctcctaatcgtcagcaggctcag

SEQ ID NO: 8267 - DNA, 33 bp, Artificial Sequence
  Synthesized
gctcagtcttctcagaatcgtactttggctcag

SEQ ID NO: 8268 - DNA, 33 bp, Artificial Sequence
  Synthesized
gctcagtcttctcagtctgctcgtattgctcag

SEQ ID NO: 8269 - DNA, 33 bp, Artificial Sequence
  Synthesized
gctcagtcttctcgttttccttctcctgctcag

SEQ ID NO: 8270 - DNA, 33 bp, Artificial Sequence
  Synthesized
gctcagtcttctcgtggttctgctgctgctcag

SEQ ID NO: 8271 - DNA, 33 bp, Artificial Sequence
  Synthesized
gctcagtcttctcgtggtactattaatgctcag

SEQ ID NO: 8272 - DNA, 33 bp, Artificial Sequence
  Synthesized
gctcagtcttctcgtggtactgttactgctcag

SEQ ID NO: 8273 - DNA, 33 bp, Artificial Sequence
  Synthesized
gctcagtcttctcgtaatgctggtgaggctcag

SEQ ID NO: 8274 - DNA, 33 bp, Artificial Sequence
  Synthesized
gctcagtcttctcgtaatgtttctcaggctcag

SEQ ID NO: 8275 - DNA, 33 bp, Artificial Sequence
  Synthesized
gctcagtcttctcgtactggtttgcatgctcag

SEQ ID NO: 8276 - DNA, 33 bp, Artificial Sequence
  Synthesized
gctcagtcttctcgtactattttgggtgctcag

SEQ ID NO: 8277 - DNA, 33 bp, Artificial Sequence
  Synthesized
gctcagtcttctcgtacttctatggatgctcag

SEQ ID NO: 8278 - DNA, 33 bp, Artificial Sequence
  Synthesized
gctcagtcttcttctgctcgtattggtgctcag

SEQ ID NO: 8279 - DNA, 33 bp, Artificial Sequence
  Synthesized
gctcagtcttcttctttgttgtcttctgctcag

SEQ ID NO: 8280 - DNA, 33 bp, Artificial Sequence
  Synthesized
gctcagtcttcttctatgcgtcagatggctcag

SEQ ID NO: 8281 - DNA, 33 bp, Artificial Sequence
  Synthesized
gctcagtcttcttctcctcctactttggctcag

SEQ ID NO: 8282 - DNA, 33 bp, Artificial Sequence
  Synthesized
gctcagtcttcttctcaggataatttggctcag

SEQ ID NO: 8283 - DNA, 33 bp, Artificial Sequence
  Synthesized
gctcagtcttcttctcagcattctcgtgctcag

SEQ ID NO: 8284 - DNA, 33 bp, Artificial Sequence
  Synthesized
gctcagtcttcttctcagcgttattctgctcag

SEQ ID NO: 8285 - DNA, 33 bp, Artificial Sequence
  Synthesized
gctcagtcttcttctcagtcttttactgctcag

SEQ ID NO: 8286 - DNA, 33 bp, Artificial Sequence
  Synthesized
gctcagtcttcttctcagtattttaaggctcag

SEQ ID NO: 8287 - DNA, 33 bp, Artificial Sequence
  Synthesized
gctcagtcttcttctcgtcaggctttggctcag

SEQ ID NO: 8288 - DNA, 33 bp, Artificial Sequence
  Synthesized
gctcagtcttcttctactcagatgcgtgctcag

SEQ ID NO: 8289 - DNA, 33 bp, Artificial Sequence
  Synthesized
gctcagtcttcttctgttgctgctcgtgctcag

SEQ ID NO: 8290 - DNA, 33 bp, Artificial Sequence
  Synthesized
gctcagtcttcttctgttcctggtaaggctcag

SEQ ID NO: 8291 - DNA, 33 bp, Artificial Sequence
  Synthesized
gctcagtcttcttctgttcctcgtcaggctcag

SEQ ID NO: 8292 - DNA, 33 bp, Artificial Sequence
  Synthesized
gctcagtcttcttcttatactattcatgctcag

SEQ ID NO: 8293 - DNA, 33 bp, Artificial Sequence
  Synthesized
gctcagtcttctactgctcctggtaaggctcag

SEQ ID NO: 8294 - DNA, 33 bp, Artificial Sequence
  Synthesized
gctcagtcttctactggtggtttgaaggctcag

SEQ ID NO: 8295 - DNA, 33 bp, Artificial Sequence
  Synthesized
gctcagtcttctactattcagtctcgtgctcag

SEQ ID NO: 8296 - DNA, 33 bp, Artificial Sequence
  Synthesized
gctcagtcttctactatttcttctaaggctcag

SEQ ID NO: 8297 - DNA, 33 bp, Artificial Sequence
  Synthesized
gctcagtcttctactaagggtgatttggctcag

SEQ ID NO: 8298 - DNA, 33 bp, Artificial Sequence
  Synthesized
gctcagtcttctactaagaatttgcaggctcag

SEQ ID NO: 8299 - DNA, 33 bp, Artificial Sequence
  Synthesized
gctcagtcttctactcgtatggctcaggctcag

SEQ ID NO: 8300 - DNA, 33 bp, Artificial Sequence
  Synthesized
gctcagtcttctactcgttctttgggtgctcag

SEQ ID NO: 8301 - DNA, 33 bp, Artificial Sequence
  Synthesized
gctcagtcttctactcgttctttgaatgctcag

SEQ ID NO: 8302 - DNA, 33 bp, Artificial Sequence
  Synthesized
gctcagtcttctactcgttcttcttttgctcag

SEQ ID NO: 8303 - DNA, 33 bp, Artificial Sequence
  Synthesized
gctcagtcttctacttctaatttggttgctcag

SEQ ID NO: 8304 - DNA, 33 bp, Artificial Sequence
  Synthesized
gctcagtcttctacttctcagcgttatgctcag

SEQ ID NO: 8305 - DNA, 33 bp, Artificial Sequence
  Synthesized
gctcagtcttctacttctcgtactgatgctcag

SEQ ID NO: 8306 - DNA, 33 bp, Artificial Sequence
  Synthesized
gctcagtcttctactactgatcgtaaggctcag

SEQ ID NO: 8307 - DNA, 33 bp, Artificial Sequence
  Synthesized
gctcagtcttctacttatgttgctggtgctcag

SEQ ID NO: 8308 - DNA, 33 bp, Artificial Sequence
  Synthesized
gctcagtcttctgttggtgctcctcctgctcag

SEQ ID NO: 8309 - DNA, 33 bp, Artificial Sequence
  Synthesized
gctcagtcttctgttttgtcttctcatgctcag

SEQ ID NO: 8310 - DNA, 33 bp, Artificial Sequence
  Synthesized
gctcagtcttctgttcctaatcgtggtgctcag

SEQ ID NO: 8311 - DNA, 33 bp, Artificial Sequence
  Synthesized
gctcagtcttctgtttctgctcctcctgctcag

SEQ ID NO: 8312 - DNA, 33 bp, Artificial Sequence
  Synthesized
gctcagtcttctgtttcttctcgtcaggctcag

SEQ ID NO: 8313 - DNA, 33 bp, Artificial Sequence
  Synthesized
gctcagtcttctgttactcctgctaaggctcag

SEQ ID NO: 8314 - DNA, 33 bp, Artificial Sequence
  Synthesized
gctcagtcttcttggtctatgtctgaggctcag

SEQ ID NO: 8315 - DNA, 33 bp, Artificial Sequence
  Synthesized
gctcagtcttcttatcctaataagaatgctcag

SEQ ID NO: 8316 - DNA, 33 bp, Artificial Sequence
  Synthesized
gctcagtcttcttattctgctcctaaggctcag

SEQ ID NO: 8317 - DNA, 33 bp, Artificial Sequence
  Synthesized
gctcagtctactgctgctaattctaatgctcag

SEQ ID NO: 8318 - DNA, 33 bp, Artificial Sequence
  Synthesized
gctcagtctactgctgctcctactttggctcag

SEQ ID NO: 8319 - DNA, 33 bp, Artificial Sequence
  Synthesized
gctcagtctactgctggtaatgctgctgctcag

SEQ ID NO: 8320 - DNA, 33 bp, Artificial Sequence
  Synthesized
gctcagtctactgctggtaatgttgctgctcag

SEQ ID NO: 8321 - DNA, 33 bp, Artificial Sequence
  Synthesized
gctcagtctactgctcgtgatattcctgctcag

SEQ ID NO: 8322 - DNA, 33 bp, Artificial Sequence
  Synthesized
gctcagtctactgctcgtaatgctgctgctcag

SEQ ID NO: 8323 - DNA, 33 bp, Artificial Sequence
  Synthesized
gctcagtctactgctgttaatgctgctgctcag

SEQ ID NO: 8324 - DNA, 33 bp, Artificial Sequence
  Synthesized
gctcagtctactgatgcttctggttgggctcag

SEQ ID NO: 8325 - DNA, 33 bp, Artificial Sequence
  Synthesized
gctcagtctactgatggtaatgctgctgctcag

SEQ ID NO: 8326 - DNA, 33 bp, Artificial Sequence
  Synthesized
gctcagtctactgatggttctatgaatgctcag

SEQ ID NO: 8327 - DNA, 33 bp, Artificial Sequence
  Synthesized
gctcagtctactgattctattcctatggctcag

SEQ ID NO: 8328 - DNA, 33 bp, Artificial Sequence
  Synthesized
gctcagtctacttttgatgagaagttggctcag

SEQ ID NO: 8329 - DNA, 33 bp, Artificial Sequence
  Synthesized
gctcagtctactggtatgcctcatcctgctcag

SEQ ID NO: 8330 - DNA, 33 bp, Artificial Sequence
  Synthesized
gctcagtctactggtcgtaatattgttgctcag

SEQ ID NO: 8331 - DNA, 33 bp, Artificial Sequence
  Synthesized
gctcagtctactggttctttgtctcgtgctcag

SEQ ID NO: 8332 - DNA, 33 bp, Artificial Sequence
  Synthesized
gctcagtctactggtactggtggtcgtgctcag

SEQ ID NO: 8333 - DNA, 33 bp, Artificial Sequence
  Synthesized
gctcagtctactaaggctatgtttgctgctcag

SEQ ID NO: 8334 - DNA, 33 bp, Artificial Sequence
  Synthesized
gctcagtctactaagtctcctgttaatgctcag

SEQ ID NO: 8335 - DNA, 33 bp, Artificial Sequence
  Synthesized
gctcagtctactaagtcttctaatgttgctcag

SEQ ID NO: 8336 - DNA, 33 bp, Artificial Sequence
  Synthesized
gctcagtctactttgcgtcctttgtctgctcag

SEQ ID NO: 8337 - DNA, 33 bp, Artificial Sequence
  Synthesized
gctcagtctactttgactaagaattctgctcag

SEQ ID NO: 8338 - DNA, 33 bp, Artificial Sequence
  Synthesized
gctcagtctactcctcgtttgatgactgctcag

SEQ ID NO: 8339 - DNA, 33 bp, Artificial Sequence
  Synthesized
gctcagtctactccttctgctatgtctgctcag

SEQ ID NO: 8340 - DNA, 33 bp, Artificial Sequence
  Synthesized
gctcagtctactccttctatgtttgctgctcag

SEQ ID NO: 8341 - DNA, 33 bp, Artificial Sequence
  Synthesized
gctcagtctactcagttttcttttatggctcag

SEQ ID NO: 8342 - DNA, 33 bp, Artificial Sequence
  Synthesized
gctcagtctactcagccttcttataaggctcag

SEQ ID NO: 8343 - DNA, 33 bp, Artificial Sequence
  Synthesized
gctcagtctactcgtattcagtctcctgctcag

SEQ ID NO: 8344 - DNA, 33 bp, Artificial Sequence
  Synthesized
gctcagtctactcgtatgaattctcctgctcag

SEQ ID NO: 8345 - DNA, 33 bp, Artificial Sequence
  Synthesized
gctcagtctactcgtcctgctatgtctgctcag

SEQ ID NO: 8346 - DNA, 33 bp, Artificial Sequence
  Synthesized
gctcagtctactcgttctttttctgctgctcag

SEQ ID NO: 8347 - DNA, 33 bp, Artificial Sequence
  Synthesized
gctcagtctactcgttctacttctactgctcag

SEQ ID NO: 8348 - DNA, 33 bp, Artificial Sequence
  Synthesized
gctcagtctacttctaagtcttctttggctcag

SEQ ID NO: 8349 - DNA, 33 bp, Artificial Sequence
  Synthesized
gctcagtctacttctaataatcgttctgctcag

SEQ ID NO: 8350 - DNA, 33 bp, Artificial Sequence
  Synthesized
gctcagtctacttctccttcttcttctgctcag

SEQ ID NO: 8351 - DNA, 33 bp, Artificial Sequence
  Synthesized
gctcagtctacttctcagactgttaatgctcag

SEQ ID NO: 8352 - DNA, 33 bp, Artificial Sequence
  Synthesized
gctcagtctacttcttctactttgttggctcag

SEQ ID NO: 8353 - DNA, 33 bp, Artificial Sequence
  Synthesized
gctcagtctactactattactcgtcctgctcag

SEQ ID NO: 8354 - DNA, 33 bp, Artificial Sequence
  Synthesized
gctcagtctactactcgtactgctgttgctcag

SEQ ID NO: 8355 - DNA, 33 bp, Artificial Sequence
  Synthesized
gctcagtctactgttttgaagaatcctgctcag

SEQ ID NO: 8356 - DNA, 33 bp, Artificial Sequence
  Synthesized
gctcagtctactgttcgtaatgagcatgctcag

SEQ ID NO: 8357 - DNA, 33 bp, Artificial Sequence
  Synthesized
gctcagtctacttataagccttctcaggctcag

SEQ ID NO: 8358 - DNA, 33 bp, Artificial Sequence
  Synthesized
gctcagtctacttatttggataatcgtgctcag

SEQ ID NO: 8359 - DNA, 33 bp, Artificial Sequence
  Synthesized
gctcagtctgttgctttgatttctgctgctcag

SEQ ID NO: 8360 - DNA, 33 bp, Artificial Sequence
  Synthesized
gctcagtctgttgctcgttctggttttgctcag

SEQ ID NO: 8361 - DNA, 33 bp, Artificial Sequence
  Synthesized
gctcagtctgttgatgctaagcagttggctcag

SEQ ID NO: 8362 - DNA, 33 bp, Artificial Sequence
  Synthesized
gctcagtctgttgaggcttctgtttatgctcag

SEQ ID NO: 8363 - DNA, 33 bp, Artificial Sequence
  Synthesized
gctcagtctgttggtacttatacttctgctcag

SEQ ID NO: 8364 - DNA, 33 bp, Artificial Sequence
  Synthesized
gctcagtctgttattgctgctggttctgctcag

SEQ ID NO: 8365 - DNA, 33 bp, Artificial Sequence
  Synthesized
gctcagtctgttattcctaatttggatgctcag

SEQ ID NO: 8366 - DNA, 33 bp, Artificial Sequence
  Synthesized
gctcagtctgttaagggtttgactggtgctcag

SEQ ID NO: 8367 - DNA, 33 bp, Artificial Sequence
  Synthesized
gctcagtctgttttgcctcgtcgtaatgctcag

SEQ ID NO: 8368 - DNA, 33 bp, Artificial Sequence
  Synthesized
gctcagtctgttttgtctcgtgttactgctcag

SEQ ID NO: 8369 - DNA, 33 bp, Artificial Sequence
  Synthesized
gctcagtctgttaatcgtcatgatcctgctcag

SEQ ID NO: 8370 - DNA, 33 bp, Artificial Sequence
  Synthesized
gctcagtctgttaatcgtactggtcctgctcag

SEQ ID NO: 8371 - DNA, 33 bp, Artificial Sequence
  Synthesized
gctcagtctgttcctcgtcagggtcctgctcag

SEQ ID NO: 8372 - DNA, 33 bp, Artificial Sequence
  Synthesized
gctcagtctgttccttctttgaaggctgctcag

SEQ ID NO: 8373 - DNA, 33 bp, Artificial Sequence
  Synthesized
gctcagtctgttccttctttgaagcatgctcag

SEQ ID NO: 8374 - DNA, 33 bp, Artificial Sequence
  Synthesized
gctcagtctgttcctactaagggtattgctcag

SEQ ID NO: 8375 - DNA, 33 bp, Artificial Sequence
  Synthesized
gctcagtctgttcagcaggctaataaggctcag

SEQ ID NO: 8376 - DNA, 33 bp, Artificial Sequence
  Synthesized
gctcagtctgttcgtggttctactcatgctcag

SEQ ID NO: 8377 - DNA, 33 bp, Artificial Sequence
  Synthesized
gctcagtctgttcgtcagaattctatggctcag

SEQ ID NO: 8378 - DNA, 33 bp, Artificial Sequence
  Synthesized
gctcagtctgttcgttctcagactgttgctcag

SEQ ID NO: 8379 - DNA, 33 bp, Artificial Sequence
  Synthesized
gctcagtctgttcgttcttctgttcctgctcag

SEQ ID NO: 8380 - DNA, 33 bp, Artificial Sequence
  Synthesized
gctcagtctgtttctaagactactgttgctcag

SEQ ID NO: 8381 - DNA, 33 bp, Artificial Sequence
  Synthesized
gctcagtctgtttctttggcttctggtgctcag

SEQ ID NO: 8382 - DNA, 33 bp, Artificial Sequence
  Synthesized
gctcagtctgtttctttgacttctggtgctcag

SEQ ID NO: 8383 - DNA, 33 bp, Artificial Sequence
  Synthesized
gctcagtctgtttctcctttgcgtggtgctcag

SEQ ID NO: 8384 - DNA, 33 bp, Artificial Sequence
  Synthesized
gctcagtctgtttctcgttctaatattgctcag

SEQ ID NO: 8385 - DNA, 33 bp, Artificial Sequence
  Synthesized
gctcagtctgtttcttctaagaatttggctcag

SEQ ID NO: 8386 - DNA, 33 bp, Artificial Sequence
  Synthesized
gctcagtctgtttcttctcctttgatggctcag

SEQ ID NO: 8387 - DNA, 33 bp, Artificial Sequence
  Synthesized
gctcagtctgtttctactactcagcgtgctcag

SEQ ID NO: 8388 - DNA, 33 bp, Artificial Sequence
  Synthesized
gctcagtctgttactaagaattttcaggctcag

SEQ ID NO: 8389 - DNA, 33 bp, Artificial Sequence
  Synthesized
gctcagtctgttactaattctactactgctcag

SEQ ID NO: 8390 - DNA, 33 bp, Artificial Sequence
  Synthesized
gctcagtctgttgttgatcgtcgtttggctcag

SEQ ID NO: 8391 - DNA, 33 bp, Artificial Sequence
  Synthesized
gctcagtctgttgttaatgagaagaaggctcag

SEQ ID NO: 8392 - DNA, 33 bp, Artificial Sequence
  Synthesized
gctcagtctgttgttcctaatcatactgctcag

SEQ ID NO: 8393 - DNA, 33 bp, Artificial Sequence
  Synthesized
gctcagtcttatgctaagaatatgactgctcag

SEQ ID NO: 8394 - DNA, 33 bp, Artificial Sequence
  Synthesized
gctcagtcttatgatcctaagaagttggctcag

SEQ ID NO: 8395 - DNA, 33 bp, Artificial Sequence
  Synthesized
gctcagtcttatgatcgtgctaatactgctcag

SEQ ID NO: 8396 - DNA, 33 bp, Artificial Sequence
  Synthesized
gctcagtcttatttgtctaagttgcctgctcag

SEQ ID NO: 8397 - DNA, 33 bp, Artificial Sequence
  Synthesized
gctcagtcttattctgataagcgttctgctcag

SEQ ID NO: 8398 - DNA, 33 bp, Artificial Sequence
  Synthesized
gctcagtcttattctaatcgttctgttgctcag

SEQ ID NO: 8399 - DNA, 33 bp, Artificial Sequence
  Synthesized
gctcagtcttattctcgtactggtgctgctcag

SEQ ID NO: 8400 - DNA, 33 bp, Artificial Sequence
  Synthesized
gctcagtcttatactcatactttgcgtgctcag

SEQ ID NO: 8401 - DNA, 33 bp, Artificial Sequence
  Synthesized
gctcagtcttatacttctaaggctgctgctcag

SEQ ID NO: 8402 - DNA, 33 bp, Artificial Sequence
  Synthesized
gctcagtcttatacttctcagaattctgctcag

SEQ ID NO: 8403 - DNA, 33 bp, Artificial Sequence
  Synthesized
gctcagactgctgctggtactcgttctgctcag

SEQ ID NO: 8404 - DNA, 33 bp, Artificial Sequence
  Synthesized
gctcagactgctgctcattcttcttctgctcag

SEQ ID NO: 8405 - DNA, 33 bp, Artificial Sequence
  Synthesized
gctcagactgctgctttgcgtacttctgctcag

SEQ ID NO: 8406 - DNA, 33 bp, Artificial Sequence
  Synthesized
gctcagactgctgcttctcatcgttctgctcag

SEQ ID NO: 8407 - DNA, 33 bp, Artificial Sequence
  Synthesized
gctcagactgctggttctactttgtctgctcag

SEQ ID NO: 8408 - DNA, 33 bp, Artificial Sequence
  Synthesized
gctcagactgctcatcctcctttgttggctcag

SEQ ID NO: 8409 - DNA, 33 bp, Artificial Sequence
  Synthesized
gctcagactgctattgctactttgaatgctcag

SEQ ID NO: 8410 - DNA, 33 bp, Artificial Sequence
  Synthesized
gctcagactgctaagttgtctatgactgctcag

SEQ ID NO: 8411 - DNA, 33 bp, Artificial Sequence
  Synthesized
gctcagactgctaagtatgctactattgctcag

SEQ ID NO: 8412 - DNA, 33 bp, Artificial Sequence
  Synthesized
gctcagactgctttgggtatgaaggttgctcag

SEQ ID NO: 8413 - DNA, 33 bp, Artificial Sequence
  Synthesized
gctcagactgctttgcctcatccttttgctcag

SEQ ID NO: 8414 - DNA, 33 bp, Artificial Sequence
  Synthesized
gctcagactgctttgcctaagaagtttgctcag

SEQ ID NO: 8415 - DNA, 33 bp, Artificial Sequence
  Synthesized
gctcagactgctttgcgttctactatggctcag

SEQ ID NO: 8416 - DNA, 33 bp, Artificial Sequence
  Synthesized
gctcagactgctttgtctgtttctcgtgctcag

SEQ ID NO: 8417 - DNA, 33 bp, Artificial Sequence
  Synthesized
gctcagactgctatgaatcgtgctggtgctcag

SEQ ID NO: 8418 - DNA, 33 bp, Artificial Sequence
  Synthesized
gctcagactgctcaggttcatgttattgctcag

SEQ ID NO: 8419 - DNA, 33 bp, Artificial Sequence
  Synthesized
gctcagactgctcgtgctattggttctgctcag

SEQ ID NO: 8420 - DNA, 33 bp, Artificial Sequence
  Synthesized
gctcagactgctcgtttttctaatgctgctcag

SEQ ID NO: 8421 - DNA, 33 bp, Artificial Sequence
  Synthesized
gctcagactgctcgtggtttggagttggctcag

SEQ ID NO: 8422 - DNA, 33 bp, Artificial Sequence
  Synthesized
gctcagactgctcgtttgccttctgctgctcag

SEQ ID NO: 8423 - DNA, 33 bp, Artificial Sequence
  Synthesized
gctcagactgctcgttctacttctactgctcag

SEQ ID NO: 8424 - DNA, 33 bp, Artificial Sequence
  Synthesized
gctcagactgctcgttctgttgttactgctcag

SEQ ID NO: 8425 - DNA, 33 bp, Artificial Sequence
  Synthesized
gctcagactgctcgtgttgctgctaatgctcag

SEQ ID NO: 8426 - DNA, 33 bp, Artificial Sequence
  Synthesized
gctcagactgcttctaatcgttctattgctcag

SEQ ID NO: 8427 - DNA, 33 bp, Artificial Sequence
  Synthesized
gctcagactgcttctcagaatttgaaggctcag

SEQ ID NO: 8428 - DNA, 33 bp, Artificial Sequence
  Synthesized
gctcagactgcttctcgtccttctgctgctcag

SEQ ID NO: 8429 - DNA, 33 bp, Artificial Sequence
  Synthesized
gctcagactgcttctcgtactggttctgctcag

SEQ ID NO: 8430 - DNA, 33 bp, Artificial Sequence
  Synthesized
gctcagactgcttcttctaagatgatggctcag

SEQ ID NO: 8431 - DNA, 33 bp, Artificial Sequence
  Synthesized
gctcagactgcttcttctttgactcgtgctcag

SEQ ID NO: 8432 - DNA, 33 bp, Artificial Sequence
  Synthesized
gctcagactgctactatgtctaatttggctcag

SEQ ID NO: 8433 - DNA, 33 bp, Artificial Sequence
  Synthesized
gctcagactgctactcgtttgcagcaggctcag

SEQ ID NO: 8434 - DNA, 33 bp, Artificial Sequence
  Synthesized
gctcagactgctactcgtaatcctggtgctcag

SEQ ID NO: 8435 - DNA, 33 bp, Artificial Sequence
  Synthesized
gctcagactgctactcgttcttttatggctcag

SEQ ID NO: 8436 - DNA, 33 bp, Artificial Sequence
  Synthesized
gctcagactgctactactactacttctgctcag

SEQ ID NO: 8437 - DNA, 33 bp, Artificial Sequence
  Synthesized
gctcagactgctgttaataagactggtgctcag

SEQ ID NO: 8438 - DNA, 33 bp, Artificial Sequence
  Synthesized
gctcagactgcttatcagtctgagtctgctcag

SEQ ID NO: 8439 - DNA, 33 bp, Artificial Sequence
  Synthesized
gctcagactgatgctcgtaatgatcgtgctcag

SEQ ID NO: 8440 - DNA, 33 bp, Artificial Sequence
  Synthesized
gctcagactgataaggttttgcgtcaggctcag

SEQ ID NO: 8441 - DNA, 33 bp, Artificial Sequence
  Synthesized
gctcagactgatatgcagattggtcatgctcag

SEQ ID NO: 8442 - DNA, 33 bp, Artificial Sequence
  Synthesized
gctcagactgatatgcgtaatactaaggctcag

SEQ ID NO: 8443 - DNA, 33 bp, Artificial Sequence
  Synthesized
gctcagactgataatgcttcttctcgtgctcag

SEQ ID NO: 8444 - DNA, 33 bp, Artificial Sequence
  Synthesized
gctcagactgatcgtttggttcataatgctcag

SEQ ID NO: 8445 - DNA, 33 bp, Artificial Sequence
  Synthesized
gctcagactgatcgtcgtatggttcctgctcag

SEQ ID NO: 8446 - DNA, 33 bp, Artificial Sequence
  Synthesized
gctcagactgatcgtactaatgttaaggctcag

SEQ ID NO: 8447 - DNA, 33 bp, Artificial Sequence
  Synthesized
gctcagactgattctattcgtactcctgctcag

SEQ ID NO: 8448 - DNA, 33 bp, Artificial Sequence
  Synthesized
gctcagactgattctcctaagcgttatgctcag

SEQ ID NO: 8449 - DNA, 33 bp, Artificial Sequence
  Synthesized
gctcagactgatgttggtttgcattctgctcag

SEQ ID NO: 8450 - DNA, 33 bp, Artificial Sequence
  Synthesized
gctcagactgatgttcagttgactcaggctcag

SEQ ID NO: 8451 - DNA, 33 bp, Artificial Sequence
  Synthesized
gctcagactgaggctcgttttactcatgctcag

SEQ ID NO: 8452 - DNA, 33 bp, Artificial Sequence
  Synthesized
gctcagactgaggctcgtacttctcgtgctcag

SEQ ID NO: 8453 - DNA, 33 bp, Artificial Sequence
  Synthesized
gctcagactgagaagatggttcgtcatgctcag

SEQ ID NO: 8454 - DNA, 33 bp, Artificial Sequence
  Synthesized
gctcagactgagaagcctcgtatttatgctcag

SEQ ID NO: 8455 - DNA, 33 bp, Artificial Sequence
  Synthesized
gctcagactgagcgtcatgctcgtgatgctcag

SEQ ID NO: 8456 - DNA, 33 bp, Artificial Sequence
  Synthesized
gctcagactgagtctttttcttttatggctcag

SEQ ID NO: 8457 - DNA, 33 bp, Artificial Sequence
  Synthesized
gctcagactgagtctaataagaagttggctcag

SEQ ID NO: 8458 - DNA, 33 bp, Artificial Sequence
  Synthesized
gctcagactgagtcttctcgtaatattgctcag

SEQ ID NO: 8459 - DNA, 33 bp, Artificial Sequence
  Synthesized
gctcagactgaggtttctgctcctttggctcag

SEQ ID NO: 8460 - DNA, 33 bp, Artificial Sequence
  Synthesized
gctcagactgagtattattcttttatggctcag

SEQ ID NO: 8461 - DNA, 33 bp, Artificial Sequence
  Synthesized
gctcagacttttgatgcttctaagttggctcag

SEQ ID NO: 8462 - DNA, 33 bp, Artificial Sequence
  Synthesized
gctcagacttttggtcatcagactgttgctcag

SEQ ID NO: 8463 - DNA, 33 bp, Artificial Sequence
  Synthesized
gctcagacttttcatatttcttttatggctcag

SEQ ID NO: 8464 - DNA, 33 bp, Artificial Sequence
  Synthesized
gctcagactggtgctgttaagtcttctgctcag

SEQ ID NO: 8465 - DNA, 33 bp, Artificial Sequence
  Synthesized
gctcagactggtgcttatcgttctgctgctcag

SEQ ID NO: 8466 - DNA, 33 bp, Artificial Sequence
  Synthesized
gctcagactggtgataatcatcagactgctcag

SEQ ID NO: 8467 - DNA, 33 bp, Artificial Sequence
  Synthesized
gctcagactggtggtgctccttctaaggctcag

SEQ ID NO: 8468 - DNA, 33 bp, Artificial Sequence
  Synthesized
gctcagactggtggtgttgttcgtactgctcag

SEQ ID NO: 8469 - DNA, 33 bp, Artificial Sequence
  Synthesized
gctcagactggtaagttgattcatactgctcag

SEQ ID NO: 8470 - DNA, 33 bp, Artificial Sequence
  Synthesized
gctcagactggtaagtatggtacttctgctcag

SEQ ID NO: 8471 - DNA, 33 bp, Artificial Sequence
  Synthesized
gctcagactggtttgaaggctcctactgctcag

SEQ ID NO: 8472 - DNA, 33 bp, Artificial Sequence
  Synthesized
gctcagactggtttgcctgatttttctgctcag

SEQ ID NO: 8473 - DNA, 33 bp, Artificial Sequence
  Synthesized
gctcagactggtttgcctgatatgcatgctcag

SEQ ID NO: 8474 - DNA, 33 bp, Artificial Sequence
  Synthesized
gctcagactggtttgcctcgttttcatgctcag

SEQ ID NO: 8475 - DNA, 33 bp, Artificial Sequence
  Synthesized
gctcagactggtttgcgtgttgttcatgctcag

SEQ ID NO: 8476 - DNA, 33 bp, Artificial Sequence
  Synthesized
gctcagactggtaatttgcagactttggctcag

SEQ ID NO: 8477 - DNA, 33 bp, Artificial Sequence
  Synthesized
gctcagactggtcctaagaatgagttggctcag

SEQ ID NO: 8478 - DNA, 33 bp, Artificial Sequence
  Synthesized
gctcagactggtcgtcatgttaatactgctcag

SEQ ID NO: 8479 - DNA, 33 bp, Artificial Sequence
  Synthesized
gctcagactggtcgtattattacttctgctcag

SEQ ID NO: 8480 - DNA, 33 bp, Artificial Sequence
  Synthesized
gctcagactggtcgtattaatttggatgctcag

SEQ ID NO: 8481 - DNA, 33 bp, Artificial Sequence
  Synthesized
gctcagactggtcgtttgttgacttctgctcag

SEQ ID NO: 8482 - DNA, 33 bp, Artificial Sequence
  Synthesized
gctcagactggtcgtatggatgttttggctcag

SEQ ID NO: 8483 - DNA, 33 bp, Artificial Sequence
  Synthesized
gctcagactggtcgtcaggatactattgctcag

SEQ ID NO: 8484 - DNA, 33 bp, Artificial Sequence
  Synthesized
gctcagactggtcgttctactcctaatgctcag

SEQ ID NO: 8485 - DNA, 33 bp, Artificial Sequence
  Synthesized
gctcagactggtcgttctgttaatgttgctcag

SEQ ID NO: 8486 - DNA, 33 bp, Artificial Sequence
  Synthesized
gctcagactggttctgcttctcctaaggctcag

SEQ ID NO: 8487 - DNA, 33 bp, Artificial Sequence
  Synthesized
gctcagactggttctggtcgtaatactgctcag

SEQ ID NO: 8488 - DNA, 33 bp, Artificial Sequence
  Synthesized
gctcagactggttctattggtcatgctgctcag

SEQ ID NO: 8489 - DNA, 33 bp, Artificial Sequence
  Synthesized
gctcagactggttctttggctcagtctgctcag

SEQ ID NO: 8490 - DNA, 33 bp, Artificial Sequence
  Synthesized
gctcagactggttctttgactaatcaggctcag

SEQ ID NO: 8491 - DNA, 33 bp, Artificial Sequence
  Synthesized
gctcagactggttctttgactgttatggctcag

SEQ ID NO: 8492 - DNA, 33 bp, Artificial Sequence
  Synthesized
gctcagactggttctttgtatttgcatgctcag

SEQ ID NO: 8493 - DNA, 33 bp, Artificial Sequence
  Synthesized
gctcagactggttctcagtctattaaggctcag

SEQ ID NO: 8494 - DNA, 33 bp, Artificial Sequence
  Synthesized
gctcagactggttctcgtactatggttgctcag

SEQ ID NO: 8495 - DNA, 33 bp, Artificial Sequence
  Synthesized
gctcagactcatcatgctgctttgttggctcag

SEQ ID NO: 8496 - DNA, 33 bp, Artificial Sequence
  Synthesized
gctcagactcatattcagcgtcaggatgctcag

SEQ ID NO: 8497 - DNA, 33 bp, Artificial Sequence
  Synthesized
gctcagactcatatttctttgcagtctgctcag

SEQ ID NO: 8498 - DNA, 33 bp, Artificial Sequence
  Synthesized
gctcagactcatttgcctcataatcctgctcag

SEQ ID NO: 8499 - DNA, 33 bp, Artificial Sequence
  Synthesized
gctcagactcatttgcctatttttatggctcag

SEQ ID NO: 8500 - DNA, 33 bp, Artificial Sequence
  Synthesized
gctcagactcatttgcctcgtcattttgctcag

SEQ ID NO: 8501 - DNA, 33 bp, Artificial Sequence
  Synthesized
gctcagactcatatgaagggttctgctgctcag

SEQ ID NO: 8502 - DNA, 33 bp, Artificial Sequence
  Synthesized
gctcagactcatcagactcgttctatggctcag

SEQ ID NO: 8503 - DNA, 33 bp, Artificial Sequence
  Synthesized
gctcagactcatactgttaattctcatgctcag

SEQ ID NO: 8504 - DNA, 33 bp, Artificial Sequence
  Synthesized
gctcagactcatgtttctaaggttgctgctcag

SEQ ID NO: 8505 - DNA, 33 bp, Artificial Sequence
  Synthesized
gctcagactattgctaatactactcctgctcag

SEQ ID NO: 8506 - DNA, 33 bp, Artificial Sequence
  Synthesized
gctcagactattgcttctggtaagcatgctcag

SEQ ID NO: 8507 - DNA, 33 bp, Artificial Sequence
  Synthesized
gctcagactattgattttcctaaggttgctcag

SEQ ID NO: 8508 - DNA, 33 bp, Artificial Sequence
  Synthesized
gctcagactattgagtatgagcgtactgctcag

SEQ ID NO: 8509 - DNA, 33 bp, Artificial Sequence
  Synthesized
gctcagactattggttctttggctactgctcag

SEQ ID NO: 8510 - DNA, 33 bp, Artificial Sequence
  Synthesized
gctcagactattaagtttgcttcttctgctcag

SEQ ID NO: 8511 - DNA, 33 bp, Artificial Sequence
  Synthesized
gctcagactattttgcctcagaagaaggctcag

SEQ ID NO: 8512 - DNA, 33 bp, Artificial Sequence
  Synthesized
gctcagactattaataatcgtcagcctgctcag

SEQ ID NO: 8513 - DNA, 33 bp, Artificial Sequence
  Synthesized
gctcagactattcctcgttctgctatggctcag

SEQ ID NO: 8514 - DNA, 33 bp, Artificial Sequence
  Synthesized
gctcagactattcagaataatcctaaggctcag

SEQ ID NO: 8515 - DNA, 33 bp, Artificial Sequence
  Synthesized
gctcagactatttctcagttgcctaaggctcag

SEQ ID NO: 8516 - DNA, 33 bp, Artificial Sequence
  Synthesized
gctcagactatttctcgtgaggttcatgctcag

SEQ ID NO: 8517 - DNA, 33 bp, Artificial Sequence
  Synthesized
gctcagactattactgattctcgtactgctcag

SEQ ID NO: 8518 - DNA, 33 bp, Artificial Sequence
  Synthesized
gctcagactattgtttcttctaatcctgctcag

SEQ ID NO: 8519 - DNA, 33 bp, Artificial Sequence
  Synthesized
gctcagactaaggcttctgttatgactgctcag

SEQ ID NO: 8520 - DNA, 33 bp, Artificial Sequence
  Synthesized
gctcagactaagggtgttgatatgcctgctcag

SEQ ID NO: 8521 - DNA, 33 bp, Artificial Sequence
  Synthesized
gctcagactaagatttatcctggtgttgctcag

SEQ ID NO: 8522 - DNA, 33 bp, Artificial Sequence
  Synthesized
gctcagactaagttgcatgatcgtcaggctcag

SEQ ID NO: 8523 - DNA, 33 bp, Artificial Sequence
  Synthesized
gctcagactaagttgttgccttcttctgctcag

SEQ ID NO: 8524 - DNA, 33 bp, Artificial Sequence
  Synthesized
gctcagactaagttgtcttctgttgttgctcag

SEQ ID NO: 8525 - DNA, 33 bp, Artificial Sequence
  Synthesized
gctcagactaagatgactgatgtttatgctcag

SEQ ID NO: 8526 - DNA, 33 bp, Artificial Sequence
  Synthesized
gctcagactaagaataatattatgatggctcag

SEQ ID NO: 8527 - DNA, 33 bp, Artificial Sequence
  Synthesized
gctcagactaagaatgtttctgctatggctcag

SEQ ID NO: 8528 - DNA, 33 bp, Artificial Sequence
  Synthesized
gctcagactaagcctatgttgtctcctgctcag

SEQ ID NO: 8529 - DNA, 33 bp, Artificial Sequence
  Synthesized
gctcagactaagcaggttttgggtgaggctcag

SEQ ID NO: 8530 - DNA, 33 bp, Artificial Sequence
  Synthesized
gctcagactaagcgtgataataatattgctcag

SEQ ID NO: 8531 - DNA, 33 bp, Artificial Sequence
  Synthesized
gctcagactaagtctggtacttgggttgctcag

SEQ ID NO: 8532 - DNA, 33 bp, Artificial Sequence
  Synthesized
gctcagactaagtcttctccttatatggctcag

SEQ ID NO: 8533 - DNA, 33 bp, Artificial Sequence
  Synthesized
gctcagactaagtctactatgaatatggctcag

SEQ ID NO: 8534 - DNA, 33 bp, Artificial Sequence
  Synthesized
gctcagactaagtctacttatgttcctgctcag

SEQ ID NO: 8535 - DNA, 33 bp, Artificial Sequence
  Synthesized
gctcagactaagactgctacttatcatgctcag

SEQ ID NO: 8536 - DNA, 33 bp, Artificial Sequence
  Synthesized
gctcagactaagactttgggttcttatgctcag

SEQ ID NO: 8537 - DNA, 33 bp, Artificial Sequence
  Synthesized
gctcagactaagactcagatgactgttgctcag

SEQ ID NO: 8538 - DNA, 33 bp, Artificial Sequence
  Synthesized
gctcagactaaggttcagactttgaatgctcag

SEQ ID NO: 8539 - DNA, 33 bp, Artificial Sequence
  Synthesized
gctcagactaagtatgctattcgtgatgctcag

SEQ ID NO: 8540 - DNA, 33 bp, Artificial Sequence
  Synthesized
gctcagactttggctgataataagcgtgctcag

SEQ ID NO: 8541 - DNA, 33 bp, Artificial Sequence
  Synthesized
gctcagactttggctaatcctaatgttgctcag

SEQ ID NO: 8542 - DNA, 33 bp, Artificial Sequence
  Synthesized
gctcagactttgcatgttaatcgtattgctcag

SEQ ID NO: 8543 - DNA, 33 bp, Artificial Sequence
  Synthesized
gctcagactttgaagcctcctgttaatgctcag

SEQ ID NO: 8544 - DNA, 33 bp, Artificial Sequence
  Synthesized
gctcagactttgaagactgagaagttggctcag

SEQ ID NO: 8545 - DNA, 33 bp, Artificial Sequence
  Synthesized
gctcagactttgaataatcctttgaaggctcag

SEQ ID NO: 8546 - DNA, 33 bp, Artificial Sequence
  Synthesized
gctcagactttgcctgttaagggtactgctcag

SEQ ID NO: 8547 - DNA, 33 bp, Artificial Sequence
  Synthesized
gctcagactttgcagaagtcttctgttgctcag

SEQ ID NO: 8548 - DNA, 33 bp, Artificial Sequence
  Synthesized
gctcagactttgcagttggatattggtgctcag

SEQ ID NO: 8549 - DNA, 33 bp, Artificial Sequence
  Synthesized
gctcagactttgcgtgctcatatggatgctcag

SEQ ID NO: 8550 - DNA, 33 bp, Artificial Sequence
  Synthesized
gctcagactttgcgtgagtctactatggctcag

SEQ ID NO: 8551 - DNA, 33 bp, Artificial Sequence
  Synthesized
gctcagactttgcgtggtattactgatgctcag

SEQ ID NO: 8552 - DNA, 33 bp, Artificial Sequence
  Synthesized
gctcagactttgcgtaagtcttttatggctcag

SEQ ID NO: 8553 - DNA, 33 bp, Artificial Sequence
  Synthesized
gctcagactttgcgtaatgttgctactgctcag

SEQ ID NO: 8554 - DNA, 33 bp, Artificial Sequence
  Synthesized
gctcagactttgtctggtgtttgttctgctcag

SEQ ID NO: 8555 - DNA, 33 bp, Artificial Sequence
  Synthesized
gctcagactttgtctatgttggctaatgctcag

SEQ ID NO: 8556 - DNA, 33 bp, Artificial Sequence
  Synthesized
gctcagactttgtctcagatgcatgctgctcag

SEQ ID NO: 8557 - DNA, 33 bp, Artificial Sequence
  Synthesized
gctcagactttgactattggtaagaatgctcag

SEQ ID NO: 8558 - DNA, 33 bp, Artificial Sequence
  Synthesized
gctcagactttgactattcctaagtctgctcag

SEQ ID NO: 8559 - DNA, 33 bp, Artificial Sequence
  Synthesized
gctcagactttggttcgtgatcctactgctcag

SEQ ID NO: 8560 - DNA, 33 bp, Artificial Sequence
  Synthesized
gctcagactttgtatactcctaagatggctcag

SEQ ID NO: 8561 - DNA, 33 bp, Artificial Sequence
  Synthesized
gctcagactatggctaagtttgagaaggctcag

SEQ ID NO: 8562 - DNA, 33 bp, Artificial Sequence
  Synthesized
gctcagactatgggtttgtctcgtggtgctcag

SEQ ID NO: 8563 - DNA, 33 bp, Artificial Sequence
  Synthesized
gctcagactatgaaggaggttttggttgctcag

SEQ ID NO: 8564 - DNA, 33 bp, Artificial Sequence
  Synthesized
gctcagactatgaagcataatactaatgctcag

SEQ ID NO: 8565 - DNA, 33 bp, Artificial Sequence
  Synthesized
gctcagactatgaagcaggagattaatgctcag

SEQ ID NO: 8566 - DNA, 33 bp, Artificial Sequence
  Synthesized
gctcagactatgaagtctaatttgattgctcag

SEQ ID NO: 8567 - DNA, 33 bp, Artificial Sequence
  Synthesized
gctcagactatgatggagactactcgtgctcag

SEQ ID NO: 8568 - DNA, 33 bp, Artificial Sequence
  Synthesized
gctcagactatgatgcgttcttctatggctcag

SEQ ID NO: 8569 - DNA, 33 bp, Artificial Sequence
  Synthesized
gctcagactatgcctaagtctttgattgctcag

SEQ ID NO: 8570 - DNA, 33 bp, Artificial Sequence
  Synthesized
gctcagactatgcagaataaggttttggctcag

SEQ ID NO: 8571 - DNA, 33 bp, Artificial Sequence
  Synthesized
gctcagactatgcgtgatgttcgtgctgctcag

SEQ ID NO: 8572 - DNA, 33 bp, Artificial Sequence
  Synthesized
gctcagactatgcgtttgtctactgctgctcag

SEQ ID NO: 8573 - DNA, 33 bp, Artificial Sequence
  Synthesized
gctcagactatgcgttctacttctttggctcag

SEQ ID NO: 8574 - DNA, 33 bp, Artificial Sequence
  Synthesized
gctcagactatgtctcgtttgcaggctgctcag

SEQ ID NO: 8575 - DNA, 33 bp, Artificial Sequence
  Synthesized
gctcagactatgactcagattaagactgctcag

SEQ ID NO: 8576 - DNA, 33 bp, Artificial Sequence
  Synthesized
gctcagactaatgcttctcctgttaatgctcag

SEQ ID NO: 8577 - DNA, 33 bp, Artificial Sequence
  Synthesized
gctcagactaatgcttattcttctgttgctcag

SEQ ID NO: 8578 - DNA, 33 bp, Artificial Sequence
  Synthesized
gctcagactaatggttatcgtcagaatgctcag

SEQ ID NO: 8579 - DNA, 33 bp, Artificial Sequence
  Synthesized
gctcagactaatcatactcgtcgtactgctcag

SEQ ID NO: 8580 - DNA, 33 bp, Artificial Sequence
  Synthesized
gctcagactaatcatgttcgttctgctgctcag

SEQ ID NO: 8581 - DNA, 33 bp, Artificial Sequence
  Synthesized
gctcagactaatattactcgttttcatgctcag

SEQ ID NO: 8582 - DNA, 33 bp, Artificial Sequence
  Synthesized
gctcagactaatttgactaagccttctgctcag

SEQ ID NO: 8583 - DNA, 33 bp, Artificial Sequence
  Synthesized
gctcagactaatttgactcgtggtcatgctcag

SEQ ID NO: 8584 - DNA, 33 bp, Artificial Sequence
  Synthesized
gctcagactaatatgactaagtctcaggctcag

SEQ ID NO: 8585 - DNA, 33 bp, Artificial Sequence
  Synthesized
gctcagactaataatactatttatatggctcag

SEQ ID NO: 8586 - DNA, 33 bp, Artificial Sequence
  Synthesized
gctcagactaataatactaagttggctgctcag

SEQ ID NO: 8587 - DNA, 33 bp, Artificial Sequence
  Synthesized
gctcagactaataatacttatatttttgctcag

SEQ ID NO: 8588 - DNA, 33 bp, Artificial Sequence
  Synthesized
gctcagactaatcctcatcctggttctgctcag

SEQ ID NO: 8589 - DNA, 33 bp, Artificial Sequence
  Synthesized
gctcagactaatcctcatcgtttttctgctcag

SEQ ID NO: 8590 - DNA, 33 bp, Artificial Sequence
  Synthesized
gctcagactaatcctaaggttcgttctgctcag

SEQ ID NO: 8591 - DNA, 33 bp, Artificial Sequence
  Synthesized
gctcagactaatcctatgcatatttctgctcag

SEQ ID NO: 8592 - DNA, 33 bp, Artificial Sequence
  Synthesized
gctcagactaatcctactcgtatttatgctcag

SEQ ID NO: 8593 - DNA, 33 bp, Artificial Sequence
  Synthesized
gctcagactaatcctactcgtaatcctgctcag

SEQ ID NO: 8594 - DNA, 33 bp, Artificial Sequence
  Synthesized
gctcagactaatcctgttcgtcgttctgctcag

SEQ ID NO: 8595 - DNA, 33 bp, Artificial Sequence
  Synthesized
gctcagactaatcctgttactcgttctgctcag

SEQ ID NO: 8596 - DNA, 33 bp, Artificial Sequence
  Synthesized
gctcagactaatcagtctaatcgttatgctcag

SEQ ID NO: 8597 - DNA, 33 bp, Artificial Sequence
  Synthesized
gctcagactaatcgtgctcatttttctgctcag

SEQ ID NO: 8598 - DNA, 33 bp, Artificial Sequence
  Synthesized
gctcagactaattctcagaatgttttggctcag

SEQ ID NO: 8599 - DNA, 33 bp, Artificial Sequence
  Synthesized
gctcagactaattctgttaaggctactgctcag

SEQ ID NO: 8600 - DNA, 33 bp, Artificial Sequence
  Synthesized
gctcagactaatactactaaggctactgctcag

SEQ ID NO: 8601 - DNA, 33 bp, Artificial Sequence
  Synthesized
gctcagactaatactactaagtctatggctcag

SEQ ID NO: 8602 - DNA, 33 bp, Artificial Sequence
  Synthesized
gctcagactaatactgttaaggagttggctcag

SEQ ID NO: 8603 - DNA, 33 bp, Artificial Sequence
  Synthesized
gctcagactaatactgttcgtgcttctgctcag

SEQ ID NO: 8604 - DNA, 33 bp, Artificial Sequence
  Synthesized
gctcagactaatgttactcgtggtcgtgctcag

SEQ ID NO: 8605 - DNA, 33 bp, Artificial Sequence
  Synthesized
gctcagactaattatgctaattctcgtgctcag

SEQ ID NO: 8606 - DNA, 33 bp, Artificial Sequence
  Synthesized
gctcagactaattatactcgttttcaggctcag

SEQ ID NO: 8607 - DNA, 33 bp, Artificial Sequence
  Synthesized
gctcagactaattatactcgtcctttggctcag

SEQ ID NO: 8608 - DNA, 33 bp, Artificial Sequence
  Synthesized
gctcagactcctggtgagcgtatgttggctcag

SEQ ID NO: 8609 - DNA, 33 bp, Artificial Sequence
  Synthesized
gctcagactcctggttctgttgttatggctcag

SEQ ID NO: 8610 - DNA, 33 bp, Artificial Sequence
  Synthesized
gctcagactcctaagtttaaggcttctgctcag

SEQ ID NO: 8611 - DNA, 33 bp, Artificial Sequence
  Synthesized
gctcagactcctttgttggttactcgtgctcag

SEQ ID NO: 8612 - DNA, 33 bp, Artificial Sequence
  Synthesized
gctcagactcctttgtctactcgtactgctcag

SEQ ID NO: 8613 - DNA, 33 bp, Artificial Sequence
  Synthesized
gctcagactcctatgatgtcttttatggctcag

SEQ ID NO: 8614 - DNA, 33 bp, Artificial Sequence
  Synthesized
gctcagactcctcgtgctactgataaggctcag

SEQ ID NO: 8615 - DNA, 33 bp, Artificial Sequence
  Synthesized
gctcagactcctcgtgttcagcctgatgctcag

SEQ ID NO: 8616 - DNA, 33 bp, Artificial Sequence
  Synthesized
gctcagactccttctattacttctggtgctcag

SEQ ID NO: 8617 - DNA, 33 bp, Artificial Sequence
  Synthesized
gctcagactcctactttgacttctcctgctcag

SEQ ID NO: 8618 - DNA, 33 bp, Artificial Sequence
  Synthesized
gctcagactcctactatgtctttgcgtgctcag

SEQ ID NO: 8619 - DNA, 33 bp, Artificial Sequence
  Synthesized
gctcagactcctactacttctgctaaggctcag

SEQ ID NO: 8620 - DNA, 33 bp, Artificial Sequence
  Synthesized
gctcagactcctactacttctcctcatgctcag

SEQ ID NO: 8621 - DNA, 33 bp, Artificial Sequence
  Synthesized
gctcagactccttataagcattctactgctcag

SEQ ID NO: 8622 - DNA, 33 bp, Artificial Sequence
  Synthesized
gctcagactcaggctggttctactttggctcag

SEQ ID NO: 8623 - DNA, 33 bp, Artificial Sequence
  Synthesized
gctcagactcaggctcgtcagactactgctcag

SEQ ID NO: 8624 - DNA, 33 bp, Artificial Sequence
  Synthesized
gctcagactcaggatcgtcgtatgttggctcag

SEQ ID NO: 8625 - DNA, 33 bp, Artificial Sequence
  Synthesized
gctcagactcagggtattgctcagcgtgctcag

SEQ ID NO: 8626 - DNA, 33 bp, Artificial Sequence
  Synthesized
gctcagactcagggttctacttctttggctcag

SEQ ID NO: 8627 - DNA, 33 bp, Artificial Sequence
  Synthesized
gctcagactcagattcagcgtcagggtgctcag

SEQ ID NO: 8628 - DNA, 33 bp, Artificial Sequence
  Synthesized
gctcagactcagttgggtacttctgatgctcag

SEQ ID NO: 8629 - DNA, 33 bp, Artificial Sequence
  Synthesized
gctcagactcagttgaagtctactatggctcag

SEQ ID NO: 8630 - DNA, 33 bp, Artificial Sequence
  Synthesized
gctcagactcagttgcctcgtgatcgtgctcag

SEQ ID NO: 8631 - DNA, 33 bp, Artificial Sequence
  Synthesized
gctcagactcagttgactgttcagcctgctcag

SEQ ID NO: 8632 - DNA, 33 bp, Artificial Sequence
  Synthesized
gctcagactcagaatttgcgtactgatgctcag

SEQ ID NO: 8633 - DNA, 33 bp, Artificial Sequence
  Synthesized
gctcagactcagcctactcgtactggtgctcag

SEQ ID NO: 8634 - DNA, 33 bp, Artificial Sequence
  Synthesized
gctcagactcagcctactactaatatggctcag

SEQ ID NO: 8635 - DNA, 33 bp, Artificial Sequence
  Synthesized
gctcagactcagcgttcttatactaatgctcag

SEQ ID NO: 8636 - DNA, 33 bp, Artificial Sequence
  Synthesized
gctcagactcagtctgctttggttaaggctcag

SEQ ID NO: 8637 - DNA, 33 bp, Artificial Sequence
  Synthesized
gctcagactcagtctttgtctgctatggctcag

SEQ ID NO: 8638 - DNA, 33 bp, Artificial Sequence
  Synthesized
gctcagactcagtctaatattggtcgtgctcag

SEQ ID NO: 8639 - DNA, 33 bp, Artificial Sequence
  Synthesized
gctcagactcagactttgacttctgatgctcag

SEQ ID NO: 8640 - DNA, 33 bp, Artificial Sequence
  Synthesized
gctcagactcagactttgactacttctgctcag

SEQ ID NO: 8641 - DNA, 33 bp, Artificial Sequence
  Synthesized
gctcagactcagactcgtgtttctggtgctcag

SEQ ID NO: 8642 - DNA, 33 bp, Artificial Sequence
  Synthesized
gctcagactcaggttggtgtttatgatgctcag

SEQ ID NO: 8643 - DNA, 33 bp, Artificial Sequence
  Synthesized
gctcagactcaggttccttctcgtttggctcag

SEQ ID NO: 8644 - DNA, 33 bp, Artificial Sequence
  Synthesized
gctcagactcgtgctttgtctgctatggctcag

SEQ ID NO: 8645 - DNA, 33 bp, Artificial Sequence
  Synthesized
gctcagactcgtgctcagttgggttctgctcag

SEQ ID NO: 8646 - DNA, 33 bp, Artificial Sequence
  Synthesized
gctcagactcgtgcttctgatactaaggctcag

SEQ ID NO: 8647 - DNA, 33 bp, Artificial Sequence
  Synthesized
gctcagactcgtgatggtactactactgctcag

SEQ ID NO: 8648 - DNA, 33 bp, Artificial Sequence
  Synthesized
gctcagactcgtgagcatgctaagggtgctcag

SEQ ID NO: 8649 - DNA, 33 bp, Artificial Sequence
  Synthesized
gctcagactcgtgagttgatgtctggtgctcag

SEQ ID NO: 8650 - DNA, 33 bp, Artificial Sequence
  Synthesized
gctcagactcgtgagaatgctcagactgctcag

SEQ ID NO: 8651 - DNA, 33 bp, Artificial Sequence
  Synthesized
gctcagactcgtggtgctggtactcaggctcag

SEQ ID NO: 8652 - DNA, 33 bp, Artificial Sequence
  Synthesized
gctcagactcgtggttctggtcatattgctcag

SEQ ID NO: 8653 - DNA, 33 bp, Artificial Sequence
  Synthesized
gctcagactcgtggttctcagccttctgctcag

SEQ ID NO: 8654 - DNA, 33 bp, Artificial Sequence
  Synthesized
gctcagactcgtggttctgttgctattgctcag

SEQ ID NO: 8655 - DNA, 33 bp, Artificial Sequence
  Synthesized
gctcagactcgtattccttctgttgttgctcag

SEQ ID NO: 8656 - DNA, 33 bp, Artificial Sequence
  Synthesized
gctcagactcgtattcagaatatgactgctcag

SEQ ID NO: 8657 - DNA, 33 bp, Artificial Sequence
  Synthesized
gctcagactcgtttgttggatcctaatgctcag

SEQ ID NO: 8658 - DNA, 33 bp, Artificial Sequence
  Synthesized
gctcagactcgtttgcctcgtggtatggctcag

SEQ ID NO: 8659 - DNA, 33 bp, Artificial Sequence
  Synthesized
gctcagactcgtttgtcttctgttactgctcag

SEQ ID NO: 8660 - DNA, 33 bp, Artificial Sequence
  Synthesized
gctcagactcgtaatgatcctaatattgctcag

SEQ ID NO: 8661 - DNA, 33 bp, Artificial Sequence
  Synthesized
gctcagactcgtaatcattctggtaatgctcag

SEQ ID NO: 8662 - DNA, 33 bp, Artificial Sequence
  Synthesized
gctcagactcgtaatcaggctttgactgctcag

SEQ ID NO: 8663 - DNA, 33 bp, Artificial Sequence
  Synthesized
gctcagactcgtcagcctgatcataatgctcag

SEQ ID NO: 8664 - DNA, 33 bp, Artificial Sequence
  Synthesized
gctcagactcgtcagtcttcttctattgctcag

SEQ ID NO: 8665 - DNA, 33 bp, Artificial Sequence
  Synthesized
gctcagactcgttctggtgctactatggctcag

SEQ ID NO: 8666 - DNA, 33 bp, Artificial Sequence
  Synthesized
gctcagactcgttctaaggatattactgctcag

SEQ ID NO: 8667 - DNA, 33 bp, Artificial Sequence
  Synthesized
gctcagactcgttcttctactcagattgctcag

SEQ ID NO: 8668 - DNA, 33 bp, Artificial Sequence
  Synthesized
gctcagactcgttctgtttcttctgatgctcag

SEQ ID NO: 8669 - DNA, 33 bp, Artificial Sequence
  Synthesized
gctcagactcgtactcatcagcctgaggctcag

SEQ ID NO: 8670 - DNA, 33 bp, Artificial Sequence
  Synthesized
gctcagacttctgctgcttctcataaggctcag

SEQ ID NO: 8671 - DNA, 33 bp, Artificial Sequence
  Synthesized
gctcagacttctgctggtcgtgcttctgctcag

SEQ ID NO: 8672 - DNA, 33 bp, Artificial Sequence
  Synthesized
gctcagacttctgctattgatcgtaatgctcag

SEQ ID NO: 8673 - DNA, 33 bp, Artificial Sequence
  Synthesized
gctcagacttctgcttctccttctttggctcag

SEQ ID NO: 8674 - DNA, 33 bp, Artificial Sequence
  Synthesized
gctcagacttctgctactgctgttcgtgctcag

SEQ ID NO: 8675 - DNA, 33 bp, Artificial Sequence
  Synthesized
gctcagacttcttttcctggtattaaggctcag

SEQ ID NO: 8676 - DNA, 33 bp, Artificial Sequence
  Synthesized
gctcagacttctggtcatactttgcaggctcag

SEQ ID NO: 8677 - DNA, 33 bp, Artificial Sequence
  Synthesized
gctcagacttctggtcagcgtcgtgatgctcag

SEQ ID NO: 8678 - DNA, 33 bp, Artificial Sequence
  Synthesized
gctcagacttctcatacttctgttcaggctcag

SEQ ID NO: 8679 - DNA, 33 bp, Artificial Sequence
  Synthesized
gctcagacttctattggtcgtcctgatgctcag

SEQ ID NO: 8680 - DNA, 33 bp, Artificial Sequence
  Synthesized
gctcagacttctatttctcgtttgcctgctcag

SEQ ID NO: 8681 - DNA, 33 bp, Artificial Sequence
  Synthesized
gctcagacttctaagtctcctgttattgctcag

SEQ ID NO: 8682 - DNA, 33 bp, Artificial Sequence
  Synthesized
gctcagacttctaagtctgtttcttctgctcag

SEQ ID NO: 8683 - DNA, 33 bp, Artificial Sequence
  Synthesized
gctcagacttctaagactttgcctttggctcag

SEQ ID NO: 8684 - DNA, 33 bp, Artificial Sequence
  Synthesized
gctcagacttctttggagttgtctcgtgctcag

SEQ ID NO: 8685 - DNA, 33 bp, Artificial Sequence
  Synthesized
gctcagacttctttgcctcgtttggaggctcag

SEQ ID NO: 8686 - DNA, 33 bp, Artificial Sequence
  Synthesized
gctcagacttctttgcctcgtcgtgatgctcag

SEQ ID NO: 8687 - DNA, 33 bp, Artificial Sequence
  Synthesized
gctcagacttctttgcgtgctactaatgctcag

SEQ ID NO: 8688 - DNA, 33 bp, Artificial Sequence
  Synthesized
gctcagacttctttgtatcctcatgttgctcag

SEQ ID NO: 8689 - DNA, 33 bp, Artificial Sequence
  Synthesized
gctcagacttctaatcagatgatggttgctcag

SEQ ID NO: 8690 - DNA, 33 bp, Artificial Sequence
  Synthesized
gctcagacttctaatcgtcaggttgatgctcag

SEQ ID NO: 8691 - DNA, 33 bp, Artificial Sequence
  Synthesized
gctcagacttctcctcagatttctttggctcag

SEQ ID NO: 8692 - DNA, 33 bp, Artificial Sequence
  Synthesized
gctcagacttctccttcttctttgcgtgctcag

SEQ ID NO: 8693 - DNA, 33 bp, Artificial Sequence
  Synthesized
gctcagacttctcaggttactcgtattgctcag

SEQ ID NO: 8694 - DNA, 33 bp, Artificial Sequence
  Synthesized
gctcagacttctcgtgagcctgatcgtgctcag

SEQ ID NO: 8695 - DNA, 33 bp, Artificial Sequence
  Synthesized
gctcagacttctcgtgagtctttgattgctcag

SEQ ID NO: 8696 - DNA, 33 bp, Artificial Sequence
  Synthesized
gctcagacttctcgtttgcatgctgaggctcag

SEQ ID NO: 8697 - DNA, 33 bp, Artificial Sequence
  Synthesized
gctcagacttctcgtcctacttctttggctcag

SEQ ID NO: 8698 - DNA, 33 bp, Artificial Sequence
  Synthesized
gctcagacttctcgttcttctgcttctgctcag

SEQ ID NO: 8699 - DNA, 33 bp, Artificial Sequence
  Synthesized
gctcagacttctcgttcttcttcttttgctcag

SEQ ID NO: 8700 - DNA, 33 bp, Artificial Sequence
  Synthesized
gctcagacttctcgttctactcctcctgctcag

SEQ ID NO: 8701 - DNA, 33 bp, Artificial Sequence
  Synthesized
gctcagacttctcgtacttctcctactgctcag

SEQ ID NO: 8702 - DNA, 33 bp, Artificial Sequence
  Synthesized
gctcagacttctcgtgttgctttggatgctcag

SEQ ID NO: 8703 - DNA, 33 bp, Artificial Sequence
  Synthesized
gctcagacttctcgtgtttctggtgatgctcag

SEQ ID NO: 8704 - DNA, 33 bp, Artificial Sequence
  Synthesized
gctcagacttcttctatgcattctgttgctcag

SEQ ID NO: 8705 - DNA, 33 bp, Artificial Sequence
  Synthesized
gctcagacttcttctaatcgtcagttggctcag

SEQ ID NO: 8706 - DNA, 33 bp, Artificial Sequence
  Synthesized
gctcagacttcttctaatcgttctcatgctcag

SEQ ID NO: 8707 - DNA, 33 bp, Artificial Sequence
  Synthesized
gctcagacttcttctaatgttatgcgtgctcag

SEQ ID NO: 8708 - DNA, 33 bp, Artificial Sequence
  Synthesized
gctcagacttcttctcagaatcgtttggctcag

SEQ ID NO: 8709 - DNA, 33 bp, Artificial Sequence
  Synthesized
gctcagacttcttcttctgctgctttggctcag

SEQ ID NO: 8710 - DNA, 33 bp, Artificial Sequence
  Synthesized
gctcagacttcttcttctcgtttgtctgctcag

SEQ ID NO: 8711 - DNA, 33 bp, Artificial Sequence
  Synthesized
gctcagacttcttctacttttcctcgtgctcag

SEQ ID NO: 8712 - DNA, 33 bp, Artificial Sequence
  Synthesized
gctcagacttcttctgtttctcgttctgctcag

SEQ ID NO: 8713 - DNA, 33 bp, Artificial Sequence
  Synthesized
gctcagacttctactgctgctaagcaggctcag

SEQ ID NO: 8714 - DNA, 33 bp, Artificial Sequence
  Synthesized
gctcagacttctactaagtctgctcaggctcag

SEQ ID NO: 8715 - DNA, 33 bp, Artificial Sequence
  Synthesized
gctcagacttctactttgcaggttaaggctcag

SEQ ID NO: 8716 - DNA, 33 bp, Artificial Sequence
  Synthesized
gctcagacttctactcagcgtacttctgctcag

SEQ ID NO: 8717 - DNA, 33 bp, Artificial Sequence
  Synthesized
gctcagacttctactcgtactattactgctcag

SEQ ID NO: 8718 - DNA, 33 bp, Artificial Sequence
  Synthesized
gctcagacttctacttctgatcgtcctgctcag

SEQ ID NO: 8719 - DNA, 33 bp, Artificial Sequence
  Synthesized
gctcagacttctacttcttctattcgtgctcag

SEQ ID NO: 8720 - DNA, 33 bp, Artificial Sequence
  Synthesized
gctcagacttctacttcttcttctcgtgctcag

SEQ ID NO: 8721 - DNA, 33 bp, Artificial Sequence
  Synthesized
gctcagacttctacttcttctgtttctgctcag

SEQ ID NO: 8722 - DNA, 33 bp, Artificial Sequence
  Synthesized
gctcagacttctgtttctcgtcaggctgctcag

SEQ ID NO: 8723 - DNA, 33 bp, Artificial Sequence
  Synthesized
gctcagacttctgtttcttctccttctgctcag

SEQ ID NO: 8724 - DNA, 33 bp, Artificial Sequence
  Synthesized
gctcagacttctgttactgctatgaaggctcag

SEQ ID NO: 8725 - DNA, 33 bp, Artificial Sequence
  Synthesized
gctcagacttcttatcctgctaagttggctcag

SEQ ID NO: 8726 - DNA, 33 bp, Artificial Sequence
  Synthesized
gctcagacttcttattctggtccttctgctcag

SEQ ID NO: 8727 - DNA, 33 bp, Artificial Sequence
  Synthesized
gctcagactactgctgcttctgctggtgctcag

SEQ ID NO: 8728 - DNA, 33 bp, Artificial Sequence
  Synthesized
gctcagactactgctgctgttaattctgctcag

SEQ ID NO: 8729 - DNA, 33 bp, Artificial Sequence
  Synthesized
gctcagactactgcttcttatactgatgctcag

SEQ ID NO: 8730 - DNA, 33 bp, Artificial Sequence
  Synthesized
gctcagactactgatgctttggttaaggctcag

SEQ ID NO: 8731 - DNA, 33 bp, Artificial Sequence
  Synthesized
gctcagactactgagcgtgctcgttctgctcag

SEQ ID NO: 8732 - DNA, 33 bp, Artificial Sequence
  Synthesized
gctcagactactttttctttgcctaaggctcag

SEQ ID NO: 8733 - DNA, 33 bp, Artificial Sequence
  Synthesized
gctcagactactggtattttgaagtctgctcag

SEQ ID NO: 8734 - DNA, 33 bp, Artificial Sequence
  Synthesized
gctcagactactggtgttcctaagtttgctcag

SEQ ID NO: 8735 - DNA, 33 bp, Artificial Sequence
  Synthesized
gctcagactactcatcagtctatttctgctcag

SEQ ID NO: 8736 - DNA, 33 bp, Artificial Sequence
  Synthesized
gctcagactactaaggctcagttgcctgctcag

SEQ ID NO: 8737 - DNA, 33 bp, Artificial Sequence
  Synthesized
gctcagactactttgatttctatgcatgctcag

SEQ ID NO: 8738 - DNA, 33 bp, Artificial Sequence
  Synthesized
gctcagactactttgcctcgtgcttctgctcag

SEQ ID NO: 8739 - DNA, 33 bp, Artificial Sequence
  Synthesized
gctcagactactttgtctaattttgttgctcag

SEQ ID NO: 8740 - DNA, 33 bp, Artificial Sequence
  Synthesized
gctcagactactaatgctcgtgtttctgctcag

SEQ ID NO: 8741 - DNA, 33 bp, Artificial Sequence
  Synthesized
gctcagactactaataaggttatgtctgctcag

SEQ ID NO: 8742 - DNA, 33 bp, Artificial Sequence
  Synthesized
gctcagactactaatactaatcctgctgctcag

SEQ ID NO: 8743 - DNA, 33 bp, Artificial Sequence
  Synthesized
gctcagactactcaggctcgtttgtctgctcag

SEQ ID NO: 8744 - DNA, 33 bp, Artificial Sequence
  Synthesized
gctcagactactcagcagcgtcagatggctcag

SEQ ID NO: 8745 - DNA, 33 bp, Artificial Sequence
  Synthesized
gctcagactactcagcgtcctttgattgctcag

SEQ ID NO: 8746 - DNA, 33 bp, Artificial Sequence
  Synthesized
gctcagactactcagactgctatgaatgctcag

SEQ ID NO: 8747 - DNA, 33 bp, Artificial Sequence
  Synthesized
gctcagactactcagactgctatgactgctcag

SEQ ID NO: 8748 - DNA, 33 bp, Artificial Sequence
  Synthesized
gctcagactactcagactcgtgcttctgctcag

SEQ ID NO: 8749 - DNA, 33 bp, Artificial Sequence
  Synthesized
gctcagactactcgtgatcagcgtgatgctcag

SEQ ID NO: 8750 - DNA, 33 bp, Artificial Sequence
  Synthesized
gctcagactactcgtggtatggaggctgctcag

SEQ ID NO: 8751 - DNA, 33 bp, Artificial Sequence
  Synthesized
gctcagactactcgtgttcagcctgatgctcag

SEQ ID NO: 8752 - DNA, 33 bp, Artificial Sequence
  Synthesized
gctcagactacttctgcttctaataatgctcag

SEQ ID NO: 8753 - DNA, 33 bp, Artificial Sequence
  Synthesized
gctcagactacttctgcttctcgtttggctcag

SEQ ID NO: 8754 - DNA, 33 bp, Artificial Sequence
  Synthesized
gctcagactacttctggttctcatttggctcag

SEQ ID NO: 8755 - DNA, 33 bp, Artificial Sequence
  Synthesized
gctcagactacttctaagggtttgatggctcag

SEQ ID NO: 8756 - DNA, 33 bp, Artificial Sequence
  Synthesized
gctcagactacttctatgcattctaaggctcag

SEQ ID NO: 8757 - DNA, 33 bp, Artificial Sequence
  Synthesized
gctcagactacttctcgtattacttctgctcag

SEQ ID NO: 8758 - DNA, 33 bp, Artificial Sequence
  Synthesized
gctcagactacttctcgtgttttgcaggctcag

SEQ ID NO: 8759 - DNA, 33 bp, Artificial Sequence
  Synthesized
gctcagactactactgctattcattctgctcag

SEQ ID NO: 8760 - DNA, 33 bp, Artificial Sequence
  Synthesized
gctcagactactactggtttgggtaaggctcag

SEQ ID NO: 8761 - DNA, 33 bp, Artificial Sequence
  Synthesized
gctcagactactgttggtcataaggctgctcag

SEQ ID NO: 8762 - DNA, 33 bp, Artificial Sequence
  Synthesized
gctcagactactgttggttctcgtactgctcag

SEQ ID NO: 8763 - DNA, 33 bp, Artificial Sequence
  Synthesized
gctcagactactgttcgttctaataatgctcag

SEQ ID NO: 8764 - DNA, 33 bp, Artificial Sequence
  Synthesized
gctcagactactgtttctattcctaatgctcag

SEQ ID NO: 8765 - DNA, 33 bp, Artificial Sequence
  Synthesized
gctcagactgttgctttgactcgtatggctcag

SEQ ID NO: 8766 - DNA, 33 bp, Artificial Sequence
  Synthesized
gctcagactgttgctactcgtttgactgctcag

SEQ ID NO: 8767 - DNA, 33 bp, Artificial Sequence
  Synthesized
gctcagactgttggtaagtctttgcctgctcag

SEQ ID NO: 8768 - DNA, 33 bp, Artificial Sequence
  Synthesized
gctcagactgttggtaagtctttggttgctcag

SEQ ID NO: 8769 - DNA, 33 bp, Artificial Sequence
  Synthesized
gctcagactgttggtcagaagtctttggctcag

SEQ ID NO: 8770 - DNA, 33 bp, Artificial Sequence
  Synthesized
gctcagactgttcattctcgtaatcctgctcag

SEQ ID NO: 8771 - DNA, 33 bp, Artificial Sequence
  Synthesized
gctcagactgttaagggtggtttgattgctcag

SEQ ID NO: 8772 - DNA, 33 bp, Artificial Sequence
  Synthesized
gctcagactgttaagactgtttctcaggctcag

SEQ ID NO: 8773 - DNA, 33 bp, Artificial Sequence
  Synthesized
gctcagactgttttggctggttcttctgctcag

SEQ ID NO: 8774 - DNA, 33 bp, Artificial Sequence
  Synthesized
gctcagactgttttgggtactaatatggctcag

SEQ ID NO: 8775 - DNA, 33 bp, Artificial Sequence
  Synthesized
gctcagactgttttgtctaagcatcaggctcag

SEQ ID NO: 8776 - DNA, 33 bp, Artificial Sequence
  Synthesized
gctcagactgttttgtctttgacttctgctcag

SEQ ID NO: 8777 - DNA, 33 bp, Artificial Sequence
  Synthesized
gctcagactgttttgtcttcttctcctgctcag

SEQ ID NO: 8778 - DNA, 33 bp, Artificial Sequence
  Synthesized
gctcagactgttaatgatactcctaaggctcag

SEQ ID NO: 8779 - DNA, 33 bp, Artificial Sequence
  Synthesized
gctcagactgttcctacttctaagaatgctcag

SEQ ID NO: 8780 - DNA, 33 bp, Artificial Sequence
  Synthesized
gctcagactgttcagggtgttcgtactgctcag

SEQ ID NO: 8781 - DNA, 33 bp, Artificial Sequence
  Synthesized
gctcagactgttcagattcagtcttttgctcag

SEQ ID NO: 8782 - DNA, 33 bp, Artificial Sequence
  Synthesized
gctcagactgttcagaataaggcttatgctcag

SEQ ID NO: 8783 - DNA, 33 bp, Artificial Sequence
  Synthesized
gctcagactgttcgttctgagcatcaggctcag

SEQ ID NO: 8784 - DNA, 33 bp, Artificial Sequence
  Synthesized
gctcagactgttcgttctactattgatgctcag

SEQ ID NO: 8785 - DNA, 33 bp, Artificial Sequence
  Synthesized
gctcagactgttcgtactactaatgctgctcag

SEQ ID NO: 8786 - DNA, 33 bp, Artificial Sequence
  Synthesized
gctcagactgtttctggttcttctaatgctcag

SEQ ID NO: 8787 - DNA, 33 bp, Artificial Sequence
  Synthesized
gctcagactgtttctattcgttcttctgctcag

SEQ ID NO: 8788 - DNA, 33 bp, Artificial Sequence
  Synthesized
gctcagactgtttcttctttgtctatggctcag

SEQ ID NO: 8789 - DNA, 33 bp, Artificial Sequence
  Synthesized
gctcagactgtttcttcttctcgtatggctcag

SEQ ID NO: 8790 - DNA, 33 bp, Artificial Sequence
  Synthesized
gctcagactgtttctactggtaagattgctcag

SEQ ID NO: 8791 - DNA, 33 bp, Artificial Sequence
  Synthesized
gctcagactgtttctactcgtttgaatgctcag

SEQ ID NO: 8792 - DNA, 33 bp, Artificial Sequence
  Synthesized
gctcagactgtttctgttgttaaggctgctcag

SEQ ID NO: 8793 - DNA, 33 bp, Artificial Sequence
  Synthesized
gctcagactgttactatgtcttctactgctcag

SEQ ID NO: 8794 - DNA, 33 bp, Artificial Sequence
  Synthesized
gctcagactgttactaatttgcgtgctgctcag

SEQ ID NO: 8795 - DNA, 33 bp, Artificial Sequence
  Synthesized
gctcagactgttacttctttgcgtttggctcag

SEQ ID NO: 8796 - DNA, 33 bp, Artificial Sequence
  Synthesized
gctcagactgttacttcttctactcgtgctcag

SEQ ID NO: 8797 - DNA, 33 bp, Artificial Sequence
  Synthesized
gctcagactgttgttaagggttctactgctcag

SEQ ID NO: 8798 - DNA, 33 bp, Artificial Sequence
  Synthesized
gctcagactgttgttcctggtacttctgctcag

SEQ ID NO: 8799 - DNA, 33 bp, Artificial Sequence
  Synthesized
gctcagactgttgttactcatactttggctcag

SEQ ID NO: 8800 - DNA, 33 bp, Artificial Sequence
  Synthesized
gctcagactgtttgggctaatggttctgctcag

SEQ ID NO: 8801 - DNA, 33 bp, Artificial Sequence
  Synthesized
gctcagactgtttatgctgctaagtctgctcag

SEQ ID NO: 8802 - DNA, 33 bp, Artificial Sequence
  Synthesized
gctcagacttggtgtcgtcattctgatgctcag

SEQ ID NO: 8803 - DNA, 33 bp, Artificial Sequence
  Synthesized
gctcagacttatgatattgctcagtctgctcag

SEQ ID NO: 8804 - DNA, 33 bp, Artificial Sequence
  Synthesized
gctcagacttatggtcgtactgatactgctcag

SEQ ID NO: 8805 - DNA, 33 bp, Artificial Sequence
  Synthesized
gctcagacttatggttctgagcatttggctcag

SEQ ID NO: 8806 - DNA, 33 bp, Artificial Sequence
  Synthesized
gctcagacttatttgcctgagcatcctgctcag

SEQ ID NO: 8807 - DNA, 33 bp, Artificial Sequence
  Synthesized
gctcagacttatttgcctgttcgttatgctcag

SEQ ID NO: 8808 - DNA, 33 bp, Artificial Sequence
  Synthesized
gctcagacttattctcattcttttatggctcag

SEQ ID NO: 8809 - DNA, 33 bp, Artificial Sequence
  Synthesized
gctcagacttatactgagtctgctgatgctcag

SEQ ID NO: 8810 - DNA, 33 bp, Artificial Sequence
  Synthesized
gctcaggttgctgctggttcttcttctgctcag

SEQ ID NO: 8811 - DNA, 33 bp, Artificial Sequence
  Synthesized
gctcaggttgctgctcctactttgcgtgctcag

SEQ ID NO: 8812 - DNA, 33 bp, Artificial Sequence
  Synthesized
gctcaggttgctgctcgttcttctttggctcag

SEQ ID NO: 8813 - DNA, 33 bp, Artificial Sequence
  Synthesized
gctcaggttgctgcttctcctcctgctgctcag

SEQ ID NO: 8814 - DNA, 33 bp, Artificial Sequence
  Synthesized
gctcaggttgctgattttcgtgctactgctcag

SEQ ID NO: 8815 - DNA, 33 bp, Artificial Sequence
  Synthesized
gctcaggttgctttgcctcctttgaaggctcag

SEQ ID NO: 8816 - DNA, 33 bp, Artificial Sequence
  Synthesized
gctcaggttgctttgcagtctcgtactgctcag

SEQ ID NO: 8817 - DNA, 33 bp, Artificial Sequence
  Synthesized
gctcaggttgctaatgatttgtatgttgctcag

SEQ ID NO: 8818 - DNA, 33 bp, Artificial Sequence
  Synthesized
gctcaggttgctaatacttctactaaggctcag

SEQ ID NO: 8819 - DNA, 33 bp, Artificial Sequence
  Synthesized
gctcaggttgctcagttgtctactttggctcag

SEQ ID NO: 8820 - DNA, 33 bp, Artificial Sequence
  Synthesized
gctcaggttgctcgtggtggttctaatgctcag

SEQ ID NO: 8821 - DNA, 33 bp, Artificial Sequence
  Synthesized
gctcaggttgctcgtcatgttgagcaggctcag

SEQ ID NO: 8822 - DNA, 33 bp, Artificial Sequence
  Synthesized
gctcaggttgctcgtaatatggagcgtgctcag

SEQ ID NO: 8823 - DNA, 33 bp, Artificial Sequence
  Synthesized
gctcaggttgctcgtactattcctgctgctcag

SEQ ID NO: 8824 - DNA, 33 bp, Artificial Sequence
  Synthesized
gctcaggttgcttctcagttgcgttctgctcag

SEQ ID NO: 8825 - DNA, 33 bp, Artificial Sequence
  Synthesized
gctcaggttgcttctacttctgctaaggctcag

SEQ ID NO: 8826 - DNA, 33 bp, Artificial Sequence
  Synthesized
gctcaggttgctactcagcctcgttttgctcag

SEQ ID NO: 8827 - DNA, 33 bp, Artificial Sequence
  Synthesized
gctcaggttgctactcagcgtcagactgctcag

SEQ ID NO: 8828 - DNA, 33 bp, Artificial Sequence
  Synthesized
gctcaggttgatattcagaagcgtcatgctcag

SEQ ID NO: 8829 - DNA, 33 bp, Artificial Sequence
  Synthesized
gctcaggttgataagcgtttgttgaatgctcag

SEQ ID NO: 8830 - DNA, 33 bp, Artificial Sequence
  Synthesized
gctcaggttgataaggttcctcgtcctgctcag

SEQ ID NO: 8831 - DNA, 33 bp, Artificial Sequence
  Synthesized
gctcaggttgataatggtaagattcgtgctcag

SEQ ID NO: 8832 - DNA, 33 bp, Artificial Sequence
  Synthesized
gctcaggttgataatggtcgtttgttggctcag

SEQ ID NO: 8833 - DNA, 33 bp, Artificial Sequence
  Synthesized
gctcaggttgataatcgtgttaatttggctcag

SEQ ID NO: 8834 - DNA, 33 bp, Artificial Sequence
  Synthesized
gctcaggttgatcctttgattcagaaggctcag

SEQ ID NO: 8835 - DNA, 33 bp, Artificial Sequence
  Synthesized
gctcaggttgatcgtcagtctcgtaatgctcag

SEQ ID NO: 8836 - DNA, 33 bp, Artificial Sequence
  Synthesized
gctcaggttgagcgttctcctgctcaggctcag

SEQ ID NO: 8837 - DNA, 33 bp, Artificial Sequence
  Synthesized
gctcaggttgagacttctgttgcttctgctcag

SEQ ID NO: 8838 - DNA, 33 bp, Artificial Sequence
  Synthesized
gctcaggtttttttgtctaatactcctgctcag

SEQ ID NO: 8839 - DNA, 33 bp, Artificial Sequence
  Synthesized
gctcaggttttttctgttgcttctgttgctcag

SEQ ID NO: 8840 - DNA, 33 bp, Artificial Sequence
  Synthesized
gctcaggttttttatttttctgctatggctcag

SEQ ID NO: 8841 - DNA, 33 bp, Artificial Sequence
  Synthesized
gctcaggttggtgctaagccttttgttgctcag

SEQ ID NO: 8842 - DNA, 33 bp, Artificial Sequence
  Synthesized
gctcaggttggttttaattctgctgttgctcag

SEQ ID NO: 8843 - DNA, 33 bp, Artificial Sequence
  Synthesized
gctcaggttggtggtgttggtcgtcctgctcag

SEQ ID NO: 8844 - DNA, 33 bp, Artificial Sequence
  Synthesized
gctcaggttggtcattatcctcattctgctcag

SEQ ID NO: 8845 - DNA, 33 bp, Artificial Sequence
  Synthesized
gctcaggttggtaagattcctactttggctcag

SEQ ID NO: 8846 - DNA, 33 bp, Artificial Sequence
  Synthesized
gctcaggttggtttgggtcaggttcgtgctcag

SEQ ID NO: 8847 - DNA, 33 bp, Artificial Sequence
  Synthesized
gctcaggttggtaatattaatttgcgtgctcag

SEQ ID NO: 8848 - DNA, 33 bp, Artificial Sequence
  Synthesized
gctcaggttggtcaggttaagaatgttgctcag

SEQ ID NO: 8849 - DNA, 33 bp, Artificial Sequence
  Synthesized
gctcaggttggtcaggttgttcctaaggctcag

SEQ ID NO: 8850 - DNA, 33 bp, Artificial Sequence
  Synthesized
gctcaggttggtcgtattggtcctgaggctcag

SEQ ID NO: 8851 - DNA, 33 bp, Artificial Sequence
  Synthesized
gctcaggttggtcgtaattcttctactgctcag

SEQ ID NO: 8852 - DNA, 33 bp, Artificial Sequence
  Synthesized
gctcaggttggtcgttctttgactaatgctcag

SEQ ID NO: 8853 - DNA, 33 bp, Artificial Sequence
  Synthesized
gctcaggttggtactgattctcatcctgctcag

SEQ ID NO: 8854 - DNA, 33 bp, Artificial Sequence
  Synthesized
gctcaggttggttatggtgctaagcctgctcag

SEQ ID NO: 8855 - DNA, 33 bp, Artificial Sequence
  Synthesized
gctcaggttcatttgccttttccttttgctcag

SEQ ID NO: 8856 - DNA, 33 bp, Artificial Sequence
  Synthesized
gctcaggttcatttgcctggttttgttgctcag

SEQ ID NO: 8857 - DNA, 33 bp, Artificial Sequence
  Synthesized
gctcaggttcatcgtgatactactttggctcag

SEQ ID NO: 8858 - DNA, 33 bp, Artificial Sequence
  Synthesized
gctcaggttcatcgttctgaggttaatgctcag

SEQ ID NO: 8859 - DNA, 33 bp, Artificial Sequence
  Synthesized
gctcaggttcatgttaagactggtactgctcag

SEQ ID NO: 8860 - DNA, 33 bp, Artificial Sequence
  Synthesized
gctcaggttattgagaatcagaaggttgctcag

SEQ ID NO: 8861 - DNA, 33 bp, Artificial Sequence
  Synthesized
gctcaggttattcatcgtgattctcctgctcag

SEQ ID NO: 8862 - DNA, 33 bp, Artificial Sequence
  Synthesized
gctcaggttattttgcctcgtcctgatgctcag

SEQ ID NO: 8863 - DNA, 33 bp, Artificial Sequence
  Synthesized
gctcaggttattaatgttcagcagcctgctcag

SEQ ID NO: 8864 - DNA, 33 bp, Artificial Sequence
  Synthesized
gctcaggttattcagcagcctggtcctgctcag

SEQ ID NO: 8865 - DNA, 33 bp, Artificial Sequence
  Synthesized
gctcaggttattcgtggtcagtctcctgctcag

SEQ ID NO: 8866 - DNA, 33 bp, Artificial Sequence
  Synthesized
gctcaggttaagggtaattctttgactgctcag

SEQ ID NO: 8867 - DNA, 33 bp, Artificial Sequence
  Synthesized
gctcaggttaagggttatcctcagttggctcag

SEQ ID NO: 8868 - DNA, 33 bp, Artificial Sequence
  Synthesized
gctcaggttaagaaggatttgtctatggctcag

SEQ ID NO: 8869 - DNA, 33 bp, Artificial Sequence
  Synthesized
gctcaggttaagttggttcgtgaggatgctcag

SEQ ID NO: 8870 - DNA, 33 bp, Artificial Sequence
  Synthesized
gctcaggttaagatgtctttgcctactgctcag

SEQ ID NO: 8871 - DNA, 33 bp, Artificial Sequence
  Synthesized
gctcaggttaagcctttgcattatgttgctcag

SEQ ID NO: 8872 - DNA, 33 bp, Artificial Sequence
  Synthesized
gctcaggttaagcctaattattcttctgctcag

SEQ ID NO: 8873 - DNA, 33 bp, Artificial Sequence
  Synthesized
gctcaggttaagcagtattctgctatggctcag

SEQ ID NO: 8874 - DNA, 33 bp, Artificial Sequence
  Synthesized
gctcaggttaagtctgctactaataatgctcag

SEQ ID NO: 8875 - DNA, 33 bp, Artificial Sequence
  Synthesized
gctcaggttaagtctttgtctttggttgctcag

SEQ ID NO: 8876 - DNA, 33 bp, Artificial Sequence
  Synthesized
gctcaggttaagtctaattatgttggtgctcag

SEQ ID NO: 8877 - DNA, 33 bp, Artificial Sequence
  Synthesized
gctcaggttaagtcttctttggttactgctcag

SEQ ID NO: 8878 - DNA, 33 bp, Artificial Sequence
  Synthesized
gctcaggttaagtcttctaattatgttgctcag

SEQ ID NO: 8879 - DNA, 33 bp, Artificial Sequence
  Synthesized
gctcaggttaagacttctactatggctgctcag

SEQ ID NO: 8880 - DNA, 33 bp, Artificial Sequence
  Synthesized
gctcaggttttggcttctcgtgataaggctcag

SEQ ID NO: 8881 - DNA, 33 bp, Artificial Sequence
  Synthesized
gctcaggttttgggtaagggtatgactgctcag

SEQ ID NO: 8882 - DNA, 33 bp, Artificial Sequence
  Synthesized
gctcaggttttgggttctggtgttggtgctcag

SEQ ID NO: 8883 - DNA, 33 bp, Artificial Sequence
  Synthesized
gctcaggttttgaagatggtttctcctgctcag

SEQ ID NO: 8884 - DNA, 33 bp, Artificial Sequence
  Synthesized
gctcaggttttgaagtctggtccttctgctcag

SEQ ID NO: 8885 - DNA, 33 bp, Artificial Sequence
  Synthesized
gctcaggttttgatgtctaaggagactgctcag

SEQ ID NO: 8886 - DNA, 33 bp, Artificial Sequence
  Synthesized
gctcaggttttgaatgcttatggttctgctcag

SEQ ID NO: 8887 - DNA, 33 bp, Artificial Sequence
  Synthesized
gctcaggttttgaatcataattctaaggctcag

SEQ ID NO: 8888 - DNA, 33 bp, Artificial Sequence
  Synthesized
gctcaggttttgaatgttaatcctaaggctcag

SEQ ID NO: 8889 - DNA, 33 bp, Artificial Sequence
  Synthesized
gctcaggttttgaattatcctaagggtgctcag

SEQ ID NO: 8890 - DNA, 33 bp, Artificial Sequence
  Synthesized
gctcaggttttgcctcagggtcagattgctcag

SEQ ID NO: 8891 - DNA, 33 bp, Artificial Sequence
  Synthesized
gctcaggttttgccttctttgcgtggtgctcag

SEQ ID NO: 8892 - DNA, 33 bp, Artificial Sequence
  Synthesized
gctcaggttttgcgttctgttaatggtgctcag

SEQ ID NO: 8893 - DNA, 33 bp, Artificial Sequence
  Synthesized
gctcaggttttgcgtacttctgctactgctcag

SEQ ID NO: 8894 - DNA, 33 bp, Artificial Sequence
  Synthesized
gctcaggttttgtctaagtctcagattgctcag

SEQ ID NO: 8895 - DNA, 33 bp, Artificial Sequence
  Synthesized
gctcaggttttgtctcctttgactcgtgctcag

SEQ ID NO: 8896 - DNA, 33 bp, Artificial Sequence
  Synthesized
gctcaggttttgtctcgttttgatgaggctcag

SEQ ID NO: 8897 - DNA, 33 bp, Artificial Sequence
  Synthesized
gctcaggttttgtcttcttctgttgatgctcag

SEQ ID NO: 8898 - DNA, 33 bp, Artificial Sequence
  Synthesized
gctcaggttttgtctacttctcgtactgctcag

SEQ ID NO: 8899 - DNA, 33 bp, Artificial Sequence
  Synthesized
gctcaggttttgactaagggttatggtgctcag

SEQ ID NO: 8900 - DNA, 33 bp, Artificial Sequence
  Synthesized
gctcaggttttgactcctactaattctgctcag

SEQ ID NO: 8901 - DNA, 33 bp, Artificial Sequence
  Synthesized
gctcaggttttggttcctactgctgatgctcag

SEQ ID NO: 8902 - DNA, 33 bp, Artificial Sequence
  Synthesized
gctcaggttatgggtaagtctggtactgctcag

SEQ ID NO: 8903 - DNA, 33 bp, Artificial Sequence
  Synthesized
gctcaggttatgaagtcttctcagttggctcag

SEQ ID NO: 8904 - DNA, 33 bp, Artificial Sequence
  Synthesized
gctcaggttatgttgcctcgtttgaaggctcag

SEQ ID NO: 8905 - DNA, 33 bp, Artificial Sequence
  Synthesized
gctcaggttatgcctgctcgtaatggtgctcag

SEQ ID NO: 8906 - DNA, 33 bp, Artificial Sequence
  Synthesized
gctcaggttatgcctacttctatgtctgctcag

SEQ ID NO: 8907 - DNA, 33 bp, Artificial Sequence
  Synthesized
gctcaggttatgcctacttctcgtactgctcag

SEQ ID NO: 8908 - DNA, 33 bp, Artificial Sequence
  Synthesized
gctcaggttatgcgttctgctaatcaggctcag

SEQ ID NO: 8909 - DNA, 33 bp, Artificial Sequence
  Synthesized
gctcaggttatgtctcgtggttcttctgctcag

SEQ ID NO: 8910 - DNA, 33 bp, Artificial Sequence
  Synthesized
gctcaggttaatgctcgtatgcctaatgctcag

SEQ ID NO: 8911 - DNA, 33 bp, Artificial Sequence
  Synthesized
gctcaggttaatgctactcgtaatgttgctcag

SEQ ID NO: 8912 - DNA, 33 bp, Artificial Sequence
  Synthesized
gctcaggttaattttactcgtgttcctgctcag

SEQ ID NO: 8913 - DNA, 33 bp, Artificial Sequence
  Synthesized
gctcaggttaatcattctttgcgttctgctcag

SEQ ID NO: 8914 - DNA, 33 bp, Artificial Sequence
  Synthesized
gctcaggttaatcatactaagggtttggctcag

SEQ ID NO: 8915 - DNA, 33 bp, Artificial Sequence
  Synthesized
gctcaggttaatcatactcgtcgtcatgctcag

SEQ ID NO: 8916 - DNA, 33 bp, Artificial Sequence
  Synthesized
gctcaggttaataagatttctaattctgctcag

SEQ ID NO: 8917 - DNA, 33 bp, Artificial Sequence
  Synthesized
gctcaggttaataagttggttcatgctgctcag

SEQ ID NO: 8918 - DNA, 33 bp, Artificial Sequence
  Synthesized
gctcaggttaataagactcgtggttatgctcag

SEQ ID NO: 8919 - DNA, 33 bp, Artificial Sequence
  Synthesized
gctcaggttaatatgaagaatactgctgctcag

SEQ ID NO: 8920 - DNA, 33 bp, Artificial Sequence
  Synthesized
gctcaggttaatatgaagtcttttatggctcag

SEQ ID NO: 8921 - DNA, 33 bp, Artificial Sequence
  Synthesized
gctcaggttaataatgctgttcgtaatgctcag

SEQ ID NO: 8922 - DNA, 33 bp, Artificial Sequence
  Synthesized
gctcaggttaataatacttttcatcaggctcag

SEQ ID NO: 8923 - DNA, 33 bp, Artificial Sequence
  Synthesized
gctcaggttaataatacttttcatcgtgctcag

SEQ ID NO: 8924 - DNA, 33 bp, Artificial Sequence
  Synthesized
gctcaggttaataatactatttatggtgctcag

SEQ ID NO: 8925 - DNA, 33 bp, Artificial Sequence
  Synthesized
gctcaggttaatcctcattatatttctgctcag

SEQ ID NO: 8926 - DNA, 33 bp, Artificial Sequence
  Synthesized
gctcaggttaatcctaagattaagtctgctcag

SEQ ID NO: 8927 - DNA, 33 bp, Artificial Sequence
  Synthesized
gctcaggttaatcctaagcctttttctgctcag

SEQ ID NO: 8928 - DNA, 33 bp, Artificial Sequence
  Synthesized
gctcaggttaatcctcagcgtccttctgctcag

SEQ ID NO: 8929 - DNA, 33 bp, Artificial Sequence
  Synthesized
gctcaggttaatcctcagactggtcgtgctcag

SEQ ID NO: 8930 - DNA, 33 bp, Artificial Sequence
  Synthesized
gctcaggttaatccttctggtatgcaggctcag

SEQ ID NO: 8931 - DNA, 33 bp, Artificial Sequence
  Synthesized
gctcaggttaatccttctaatatttctgctcag

SEQ ID NO: 8932 - DNA, 33 bp, Artificial Sequence
  Synthesized
gctcaggttaatcctactcgtcatactgctcag

SEQ ID NO: 8933 - DNA, 33 bp, Artificial Sequence
  Synthesized
gctcaggttaatccttatcagggttctgctcag

SEQ ID NO: 8934 - DNA, 33 bp, Artificial Sequence
  Synthesized
gctcaggttaatcgtgcttatgcttctgctcag

SEQ ID NO: 8935 - DNA, 33 bp, Artificial Sequence
  Synthesized
gctcaggttaatcgtcagtctaatgatgctcag

SEQ ID NO: 8936 - DNA, 33 bp, Artificial Sequence
  Synthesized
gctcaggttaatcgttctaatgttttggctcag

SEQ ID NO: 8937 - DNA, 33 bp, Artificial Sequence
  Synthesized
gctcaggttaatcgtactcgtggtattgctcag

SEQ ID NO: 8938 - DNA, 33 bp, Artificial Sequence
  Synthesized
gctcaggttaatcgtactcgtcatgaggctcag

SEQ ID NO: 8939 - DNA, 33 bp, Artificial Sequence
  Synthesized
gctcaggttaatcgtactcgtcctgctgctcag

SEQ ID NO: 8940 - DNA, 33 bp, Artificial Sequence
  Synthesized
gctcaggttaatcgtactcgtcgtcctgctcag

SEQ ID NO: 8941 - DNA, 33 bp, Artificial Sequence
  Synthesized
gctcaggttaattcttctattcgtaatgctcag

SEQ ID NO: 8942 - DNA, 33 bp, Artificial Sequence
  Synthesized
gctcaggttaattctactaagtatactgctcag

SEQ ID NO: 8943 - DNA, 33 bp, Artificial Sequence
  Synthesized
gctcaggttaattctactaagtatgttgctcag

SEQ ID NO: 8944 - DNA, 33 bp, Artificial Sequence
  Synthesized
gctcaggttaattctactcgtaatcaggctcag

SEQ ID NO: 8945 - DNA, 33 bp, Artificial Sequence
  Synthesized
gctcaggttaatactcagcctatggctgctcag

SEQ ID NO: 8946 - DNA, 33 bp, Artificial Sequence
  Synthesized
gctcaggttaatactcgtactaatgatgctcag

SEQ ID NO: 8947 - DNA, 33 bp, Artificial Sequence
  Synthesized
gctcaggttaatgttcagattgctcaggctcag

SEQ ID NO: 8948 - DNA, 33 bp, Artificial Sequence
  Synthesized
gctcaggttcctgctaagcctcctttggctcag

SEQ ID NO: 8949 - DNA, 33 bp, Artificial Sequence
  Synthesized
gctcaggttcctaagtcttctttgttggctcag

SEQ ID NO: 8950 - DNA, 33 bp, Artificial Sequence
  Synthesized
gctcaggttcctttgcctatttttcatgctcag

SEQ ID NO: 8951 - DNA, 33 bp, Artificial Sequence
  Synthesized
gctcaggttcctaatgatcctcgtcgtgctcag

SEQ ID NO: 8952 - DNA, 33 bp, Artificial Sequence
  Synthesized
gctcaggttcctaatatttcttttatggctcag

SEQ ID NO: 8953 - DNA, 33 bp, Artificial Sequence
  Synthesized
gctcaggttcctaataagatgacttttcctcag

SEQ ID NO: 8954 - DNA, 33 bp, Artificial Sequence
  Synthesized
gctcaggttcctccttctgctggtcgtgctcag

SEQ ID NO: 8955 - DNA, 33 bp, Artificial Sequence
  Synthesized
gctcaggttcctcaggctaatatgcgtgctcag

SEQ ID NO: 8956 - DNA, 33 bp, Artificial Sequence
  Synthesized
gctcaggttcctcaggcttctcgtgttgctcag

SEQ ID NO: 8957 - DNA, 33 bp, Artificial Sequence
  Synthesized
gctcaggttcctcaggcttcttctgatgctcag

SEQ ID NO: 8958 - DNA, 33 bp, Artificial Sequence
  Synthesized
gctcaggttcctcagtcttctcgtgatgctcag

SEQ ID NO: 8959 - DNA, 33 bp, Artificial Sequence
  Synthesized
gctcaggttcctcagactaatcgtcctgctcag

SEQ ID NO: 8960 - DNA, 33 bp, Artificial Sequence
  Synthesized
gctcaggttcctcgtgctgagtctactgctcag

SEQ ID NO: 8961 - DNA, 33 bp, Artificial Sequence
  Synthesized
gctcaggttcctcgtacttatcctatggctcag

SEQ ID NO: 8962 - DNA, 33 bp, Artificial Sequence
  Synthesized
gctcaggttccttctcgtaattctactgctcag

SEQ ID NO: 8963 - DNA, 33 bp, Artificial Sequence
  Synthesized
gctcaggttcctactggtcagatgggtgctcag

SEQ ID NO: 8964 - DNA, 33 bp, Artificial Sequence
  Synthesized
gctcaggttcagggtaagacttcttttgctcag

SEQ ID NO: 8965 - DNA, 33 bp, Artificial Sequence
  Synthesized
gctcaggttcagattcctcgttcttctgctcag

SEQ ID NO: 8966 - DNA, 33 bp, Artificial Sequence
  Synthesized
gctcaggttcagaagggtttgatgatggctcag

SEQ ID NO: 8967 - DNA, 33 bp, Artificial Sequence
  Synthesized
gctcaggttcagaataatacttatggtgctcag

SEQ ID NO: 8968 - DNA, 33 bp, Artificial Sequence
  Synthesized
gctcaggttcagcagactcgttctaatgctcag

SEQ ID NO: 8969 - DNA, 33 bp, Artificial Sequence
  Synthesized
gctcaggttcagcgttctaataatgttgctcag

SEQ ID NO: 8970 - DNA, 33 bp, Artificial Sequence
  Synthesized
gctcaggttcagtctcattctcgtgttgctcag

SEQ ID NO: 8971 - DNA, 33 bp, Artificial Sequence
  Synthesized
gctcaggttcgtgctgctcctgttggtgctcag

SEQ ID NO: 8972 - DNA, 33 bp, Artificial Sequence
  Synthesized
gctcaggttcgtttgcctcgtcataaggctcag

SEQ ID NO: 8973 - DNA, 33 bp, Artificial Sequence
  Synthesized
gctcaggttcgtatgttgaatactgatgctcag

SEQ ID NO: 8974 - DNA, 33 bp, Artificial Sequence
  Synthesized
gctcaggttcgtaattcttctttgaatgctcag

SEQ ID NO: 8975 - DNA, 33 bp, Artificial Sequence
  Synthesized
gctcaggttcgtcctggtaatttgtctgctcag

SEQ ID NO: 8976 - DNA, 33 bp, Artificial Sequence
  Synthesized
gctcaggttcgtcagggtggttctattgctcag

SEQ ID NO: 8977 - DNA, 33 bp, Artificial Sequence
  Synthesized
gctcaggttcgtcgtgagttgtctgaggctcag

SEQ ID NO: 8978 - DNA, 33 bp, Artificial Sequence
  Synthesized
gctcaggttcgttctgatgttcgttctgctcag

SEQ ID NO: 8979 - DNA, 33 bp, Artificial Sequence
  Synthesized
gctcaggttcgttctaatactccttctgctcag

SEQ ID NO: 8980 - DNA, 33 bp, Artificial Sequence
  Synthesized
gctcaggttcgttctgtttcttctcaggctcag

SEQ ID NO: 8981 - DNA, 33 bp, Artificial Sequence
  Synthesized
gctcaggttcgtactttggatgctaatgctcag

SEQ ID NO: 8982 - DNA, 33 bp, Artificial Sequence
  Synthesized
gctcaggttcgtactactaataatatggctcag

SEQ ID NO: 8983 - DNA, 33 bp, Artificial Sequence
  Synthesized
gctcaggtttctgctggtgcttttaaggctcag

SEQ ID NO: 8984 - DNA, 33 bp, Artificial Sequence
  Synthesized
gctcaggtttctggtaagtctgctatggctcag

SEQ ID NO: 8985 - DNA, 33 bp, Artificial Sequence
  Synthesized
gctcaggtttctggtcgtggtttggctgctcag

SEQ ID NO: 8986 - DNA, 33 bp, Artificial Sequence
  Synthesized
gctcaggtttctggtcgttctttgtctgctcag

SEQ ID NO: 8987 - DNA, 33 bp, Artificial Sequence
  Synthesized
gctcaggtttctcatactaagacttctgctcag

SEQ ID NO: 8988 - DNA, 33 bp, Artificial Sequence
  Synthesized
gctcaggtttctattggtgctacttctgctcag

SEQ ID NO: 8989 - DNA, 33 bp, Artificial Sequence
  Synthesized
gctcaggtttctattggtgatcattctgctcag

SEQ ID NO: 8990 - DNA, 33 bp, Artificial Sequence
  Synthesized
gctcaggtttctattggtgatcagtgtgctcag

SEQ ID NO: 8991 - DNA, 33 bp, Artificial Sequence
  Synthesized
gctcaggtttctattggtgatcagtctgctcag

SEQ ID NO: 8992 - DNA, 33 bp, Artificial Sequence
  Synthesized
gctcaggtttctaagggtcctgctttggctcag

SEQ ID NO: 8993 - DNA, 33 bp, Artificial Sequence
  Synthesized
gctcaggtttctaagttggctaatcctgctcag

SEQ ID NO: 8994 - DNA, 33 bp, Artificial Sequence
  Synthesized
gctcaggtttctaagacttataattctgctcag

SEQ ID NO: 8995 - DNA, 33 bp, Artificial Sequence
  Synthesized
gctcaggtttctttgaagtctcagcgtgctcag

SEQ ID NO: 8996 - DNA, 33 bp, Artificial Sequence
  Synthesized
gctcaggtttctttgcctcgtttggatgctcag

SEQ ID NO: 8997 - DNA, 33 bp, Artificial Sequence
  Synthesized
gctcaggtttctttgtcttctgttgttgctcag

SEQ ID NO: 8998 - DNA, 33 bp, Artificial Sequence
  Synthesized
gctcaggtttctatgaaggcttatactgctcag

SEQ ID NO: 8999 - DNA, 33 bp, Artificial Sequence
  Synthesized
gctcaggtttctatgaagcctttggttgctcag

SEQ ID NO: 9000 - DNA, 33 bp, Artificial Sequence
  Synthesized
gctcaggtttctaatggtttgcgtactgctcag

SEQ ID NO: 9001 - DNA, 33 bp, Artificial Sequence
  Synthesized
gctcaggtttctaataaggctactcaggctcag

SEQ ID NO: 9002 - DNA, 33 bp, Artificial Sequence
  Synthesized
gctcaggtttctcctaagtctcatcaggctcag

SEQ ID NO: 9003 - DNA, 33 bp, Artificial Sequence
  Synthesized
gctcaggtttctcctaataatcgtaatgctcag

SEQ ID NO: 9004 - DNA, 33 bp, Artificial Sequence
  Synthesized
gctcaggtttctcaggctggtcgtggtgctcag

SEQ ID NO: 9005 - DNA, 33 bp, Artificial Sequence
  Synthesized
gctcaggtttctcagaagcctattgttgctcag

SEQ ID NO: 9006 - DNA, 33 bp, Artificial Sequence
  Synthesized
gctcaggtttctcaggttgctgaggttgctcag

SEQ ID NO: 9007 - DNA, 33 bp, Artificial Sequence
  Synthesized
gctcaggtttctcgtgctgatcatactgctcag

SEQ ID NO: 9008 - DNA, 33 bp, Artificial Sequence
  Synthesized
gctcaggtttctcgtgatactcagttggctcag

SEQ ID NO: 9009 - DNA, 33 bp, Artificial Sequence
  Synthesized
gctcaggtttctcgtcagggtgctttggctcag

SEQ ID NO: 9010 - DNA, 33 bp, Artificial Sequence
  Synthesized
gctcaggtttctcgtactaatcctcctgctcag

SEQ ID NO: 9011 - DNA, 33 bp, Artificial Sequence
  Synthesized
gctcaggtttcttctgagcgtactgctgctcag

SEQ ID NO: 9012 - DNA, 33 bp, Artificial Sequence
  Synthesized
gctcaggtttcttctcagcgtttgcaggctcag

SEQ ID NO: 9013 - DNA, 33 bp, Artificial Sequence
  Synthesized
gctcaggtttcttcttcttctcgtgctgctcag

SEQ ID NO: 9014 - DNA, 33 bp, Artificial Sequence
  Synthesized
gctcaggtttcttcttcttctcgtttggctcag

SEQ ID NO: 9015 - DNA, 33 bp, Artificial Sequence
  Synthesized
gctcaggtttcttcttctactcataatgctcag

SEQ ID NO: 9016 - DNA, 33 bp, Artificial Sequence
  Synthesized
gctcaggtttcttctactggtatgcgtgctcag

SEQ ID NO: 9017 - DNA, 33 bp, Artificial Sequence
  Synthesized
gctcaggtttcttctgttcctttgcaggctcag

SEQ ID NO: 9018 - DNA, 33 bp, Artificial Sequence
  Synthesized
gctcaggtttctactaaggctgttattgctcag

SEQ ID NO: 9019 - DNA, 33 bp, Artificial Sequence
  Synthesized
gctcaggtttctactaattttcgtggtgctcag

SEQ ID NO: 9020 - DNA, 33 bp, Artificial Sequence
  Synthesized
gctcaggtttctacttctcgtggtatggctcag

SEQ ID NO: 9021 - DNA, 33 bp, Artificial Sequence
  Synthesized
gctcaggtttcttattcttctttggttgctcag

SEQ ID NO: 9022 - DNA, 33 bp, Artificial Sequence
  Synthesized
gctcaggtttcttatacttcttttatggctcag

SEQ ID NO: 9023 - DNA, 33 bp, Artificial Sequence
  Synthesized
gctcaggttactgcttctcgtgatcgtgctcag

SEQ ID NO: 9024 - DNA, 33 bp, Artificial Sequence
  Synthesized
gctcaggttactgcttctactgatgttgctcag

SEQ ID NO: 9025 - DNA, 33 bp, Artificial Sequence
  Synthesized
gctcaggttactgattctactttgcaggctcag

SEQ ID NO: 9026 - DNA, 33 bp, Artificial Sequence
  Synthesized
gctcaggttactaagcatacttcttttgctcag

SEQ ID NO: 9027 - DNA, 33 bp, Artificial Sequence
  Synthesized
gctcaggttactttgcctcgtcattatgctcag

SEQ ID NO: 9028 - DNA, 33 bp, Artificial Sequence
  Synthesized
gctcaggttactcaggctactcgtgatgctcag

SEQ ID NO: 9029 - DNA, 33 bp, Artificial Sequence
  Synthesized
gctcaggttactcgttctgatgctaatgctcag

SEQ ID NO: 9030 - DNA, 33 bp, Artificial Sequence
  Synthesized
gctcaggttacttctcctttgcagttggctcag

SEQ ID NO: 9031 - DNA, 33 bp, Artificial Sequence
  Synthesized
gctcaggttactactgctcctgagtctgctcag

SEQ ID NO: 9032 - DNA, 33 bp, Artificial Sequence
  Synthesized
gctcaggttactactaagactcagttggctcag

SEQ ID NO: 9033 - DNA, 33 bp, Artificial Sequence
  Synthesized
gctcaggttactactaatttggattctgctcag

SEQ ID NO: 9034 - DNA, 33 bp, Artificial Sequence
  Synthesized
gctcaggttactactcagaatcgtgttgctcag

SEQ ID NO: 9035 - DNA, 33 bp, Artificial Sequence
  Synthesized
gctcaggttgttgcttcttcttctaaggctcag

SEQ ID NO: 9036 - DNA, 33 bp, Artificial Sequence
  Synthesized
gctcaggttgttaagtcttctattgctgctcag

SEQ ID NO: 9037 - DNA, 33 bp, Artificial Sequence
  Synthesized
gctcaggttgttaagtcttctcctaatgctcag

SEQ ID NO: 9038 - DNA, 33 bp, Artificial Sequence
  Synthesized
gctcaggttgttttgcctcattatggtgctcag

SEQ ID NO: 9039 - DNA, 33 bp, Artificial Sequence
  Synthesized
gctcaggttgttcagaagcatttgcctgctcag

SEQ ID NO: 9040 - DNA, 33 bp, Artificial Sequence
  Synthesized
gctcaggttgttcgtaaggatgctgaggctcag

SEQ ID NO: 9041 - DNA, 33 bp, Artificial Sequence
  Synthesized
gctcaggttgtttctatttcttctaaggctcag

SEQ ID NO: 9042 - DNA, 33 bp, Artificial Sequence
  Synthesized
gctcaggttgtttctcgtacttcttctgctcag

SEQ ID NO: 9043 - DNA, 33 bp, Artificial Sequence
  Synthesized
gctcaggttgttactaagtctactatggctcag

SEQ ID NO: 9044 - DNA, 33 bp, Artificial Sequence
  Synthesized
gctcaggttgttactttgtctacttctgctcag

SEQ ID NO: 9045 - DNA, 33 bp, Artificial Sequence
  Synthesized
gctcaggttgttgttcctgagcgtactgctcag

SEQ ID NO: 9046 - DNA, 33 bp, Artificial Sequence
  Synthesized
gctcaggtttggtctactactactggtgctcag

SEQ ID NO: 9047 - DNA, 33 bp, Artificial Sequence
  Synthesized
gctcaggtttatttgcctcgtaaggatgctcag

SEQ ID NO: 9048 - DNA, 33 bp, Artificial Sequence
  Synthesized
gctcaggtttattctggttcttctggtgctcag

SEQ ID NO: 9049 - DNA, 33 bp, Artificial Sequence
  Synthesized
gctcagtgggctgctgctgagaaggaggctcag

SEQ ID NO: 9050 - DNA, 33 bp, Artificial Sequence
  Synthesized
gctcagtgggctaatgctactggtactgctcag

SEQ ID NO: 9051 - DNA, 33 bp, Artificial Sequence
  Synthesized
gctcagtgggattctttgcagactgctgctcag

SEQ ID NO: 9052 - DNA, 33 bp, Artificial Sequence
  Synthesized
gctcagtggttttatcatcagactcatgctcag

SEQ ID NO: 9053 - DNA, 33 bp, Artificial Sequence
  Synthesized
gctcagtggggtttggttgataaggatgctcag

SEQ ID NO: 9054 - DNA, 33 bp, Artificial Sequence
  Synthesized
gctcagtggattgctaaggagtctgatgctcag

SEQ ID NO: 9055 - DNA, 33 bp, Artificial Sequence
  Synthesized
gctcagtggaaggctaaggagtctgatgctcag

SEQ ID NO: 9056 - DNA, 33 bp, Artificial Sequence
  Synthesized
gctcagtggaagtctttgcagactgctgctcag

SEQ ID NO: 9057 - DNA, 33 bp, Artificial Sequence
  Synthesized
gctcagtggaagactttgactggtgaggctcag

SEQ ID NO: 9058 - DNA, 33 bp, Artificial Sequence
  Synthesized
gctcagtggatggctaaggagtcttatgctcag

SEQ ID NO: 9059 - DNA, 33 bp, Artificial Sequence
  Synthesized
gctcagtggatggctaaggagactgatgctcag

SEQ ID NO: 9060 - DNA, 33 bp, Artificial Sequence
  Synthesized
gctcagtggatggctaaggagtatgatgctcag

SEQ ID NO: 9061 - DNA, 33 bp, Artificial Sequence
  Synthesized
gctcagtggatggctaatgagtctgatgctcag

SEQ ID NO: 9062 - DNA, 33 bp, Artificial Sequence
  Synthesized
gctcagtggatgactggtcgtgattctgctcag

SEQ ID NO: 9063 - DNA, 33 bp, Artificial Sequence
  Synthesized
gctcagtggaatttgttgcagactgctgctcag

SEQ ID NO: 9064 - DNA, 33 bp, Artificial Sequence
  Synthesized
gctcagtggaattctttgaagactgctgctcag

SEQ ID NO: 9065 - DNA, 33 bp, Artificial Sequence
  Synthesized
gctcagtggaattctttgcagaatgctgctcag

SEQ ID NO: 9066 - DNA, 33 bp, Artificial Sequence
  Synthesized
gctcagtggaattctttgcagactgatgctcag

SEQ ID NO: 9067 - DNA, 33 bp, Artificial Sequence
  Synthesized
gctcagtggaattctttgcagacttctgctcag

SEQ ID NO: 9068 - DNA, 33 bp, Artificial Sequence
  Synthesized
gctcagtggcctaagcagttgcctcaggctcag

SEQ ID NO: 9069 - DNA, 33 bp, Artificial Sequence
  Synthesized
gctcagtggcctactttgcctcgtgatgctcag

SEQ ID NO: 9070 - DNA, 33 bp, Artificial Sequence
  Synthesized
gctcagtggcaggatcagcctcgtaaggctcag

SEQ ID NO: 9071 - DNA, 33 bp, Artificial Sequence
  Synthesized
gctcagtggcgttctgatggtggtaatgctcag

SEQ ID NO: 9072 - DNA, 33 bp, Artificial Sequence
  Synthesized
gctcagtggtctcaggctatgaatgctgctcag

SEQ ID NO: 9073 - DNA, 33 bp, Artificial Sequence
  Synthesized
gctcagtggtctactgctcatgctgttgctcag

SEQ ID NO: 9074 - DNA, 33 bp, Artificial Sequence
  Synthesized
gctcagtggtctacttctatggagcctgctcag

SEQ ID NO: 9075 - DNA, 33 bp, Artificial Sequence
  Synthesized
gctcagtggactaagtcttctcctaatgctcag

SEQ ID NO: 9076 - DNA, 33 bp, Artificial Sequence
  Synthesized
gctcagtggactccttctggtcgtaatgctcag

SEQ ID NO: 9077 - DNA, 33 bp, Artificial Sequence
  Synthesized
gctcagtatgctgcttctcctttgactgctcag

SEQ ID NO: 9078 - DNA, 33 bp, Artificial Sequence
  Synthesized
gctcagtatgctggtcattcttttatggctcag

SEQ ID NO: 9079 - DNA, 33 bp, Artificial Sequence
  Synthesized
gctcagtatgctaaggctgagttgaatgctcag

SEQ ID NO: 9080 - DNA, 33 bp, Artificial Sequence
  Synthesized
gctcagtatgctaagcatcctcagtctgctcag

SEQ ID NO: 9081 - DNA, 33 bp, Artificial Sequence
  Synthesized
gctcagtatgctaagtctggtgatcgtgctcag

SEQ ID NO: 9082 - DNA, 33 bp, Artificial Sequence
  Synthesized
gctcagtatgctaatgctactcgtttggctcag

SEQ ID NO: 9083 - DNA, 33 bp, Artificial Sequence
  Synthesized
gctcagtatgcttctttttcttttatggctcag

SEQ ID NO: 9084 - DNA, 33 bp, Artificial Sequence
  Synthesized
gctcagtatgcttcttctactcgtaatgctcag

SEQ ID NO: 9085 - DNA, 33 bp, Artificial Sequence
  Synthesized
gctcagtatgctactttgtctcctgatgctcag

SEQ ID NO: 9086 - DNA, 33 bp, Artificial Sequence
  Synthesized
gctcagtatgataaggcttctggtcgtgctcag

SEQ ID NO: 9087 - DNA, 33 bp, Artificial Sequence
  Synthesized
gctcagtatgatttgcctatgaagcatgctcag

SEQ ID NO: 9088 - DNA, 33 bp, Artificial Sequence
  Synthesized
gctcagtatgatcgtggtgttgttcaggctcag

SEQ ID NO: 9089 - DNA, 33 bp, Artificial Sequence
  Synthesized
gctcagtatgatcgttcttataagtctgctcag

SEQ ID NO: 9090 - DNA, 33 bp, Artificial Sequence
  Synthesized
gctcagtatgagttgcctcgtggttatgctcag

SEQ ID NO: 9091 - DNA, 33 bp, Artificial Sequence
  Synthesized
gctcagtatgagactcgttctgctaatgctcag

SEQ ID NO: 9092 - DNA, 33 bp, Artificial Sequence
  Synthesized
gctcagtattttttgcctcgtggtggtgctcag

SEQ ID NO: 9093 - DNA, 33 bp, Artificial Sequence
  Synthesized
gctcagtattttcctgattcttttatggctcag

SEQ ID NO: 9094 - DNA, 33 bp, Artificial Sequence
  Synthesized
gctcagtatggtgctttgacttcttctgctcag

SEQ ID NO: 9095 - DNA, 33 bp, Artificial Sequence
  Synthesized
gctcagtatggtggtactcctaagcctgctcag

SEQ ID NO: 9096 - DNA, 33 bp, Artificial Sequence
  Synthesized
gctcagtatggtcatttgtctgctatggctcag

SEQ ID NO: 9097 - DNA, 33 bp, Artificial Sequence
  Synthesized
gctcagtatggtttgcctgctatgggtgctcag

SEQ ID NO: 9098 - DNA, 33 bp, Artificial Sequence
  Synthesized
gctcagtatggtttgcctgataagaaggctcag

SEQ ID NO: 9099 - DNA, 33 bp, Artificial Sequence
  Synthesized
gctcagtatggtttgcctcgtgaggaggctcag

SEQ ID NO: 9100 - DNA, 33 bp, Artificial Sequence
  Synthesized
gctcagtatggtttgccttctgcttttgctcag

SEQ ID NO: 9101 - DNA, 33 bp, Artificial Sequence
  Synthesized
gctcagtatggtttgactcgtcagcctgctcag

SEQ ID NO: 9102 - DNA, 33 bp, Artificial Sequence
  Synthesized
gctcagtatggtcctggtaatttgttggctcag

SEQ ID NO: 9103 - DNA, 33 bp, Artificial Sequence
  Synthesized
gctcagtatggtccttctactttgcgtgctcag

SEQ ID NO: 9104 - DNA, 33 bp, Artificial Sequence
  Synthesized
gctcagtatggtcctactttgggtatggctcag

SEQ ID NO: 9105 - DNA, 33 bp, Artificial Sequence
  Synthesized
gctcagtatggttctcagcgtatgactgctcag

SEQ ID NO: 9106 - DNA, 33 bp, Artificial Sequence
  Synthesized
gctcagtatggttctactcgtttgcaggctcag

SEQ ID NO: 9107 - DNA, 33 bp, Artificial Sequence
  Synthesized
gctcagtatggtactgctatgcgtgatgctcag

SEQ ID NO: 9108 - DNA, 33 bp, Artificial Sequence
  Synthesized
gctcagtatggtgttcattctgctatggctcag

SEQ ID NO: 9109 - DNA, 33 bp, Artificial Sequence
  Synthesized
gctcagtatggtgttaattcttttatggctcag

SEQ ID NO: 9110 - DNA, 33 bp, Artificial Sequence
  Synthesized
gctcagtatcatattcgttctgctatggctcag

SEQ ID NO: 9111 - DNA, 33 bp, Artificial Sequence
  Synthesized
gctcagtatcatttgcctgatccttctgctcag

SEQ ID NO: 9112 - DNA, 33 bp, Artificial Sequence
  Synthesized
gctcagtatcatttgcctcatgattttgctcag

SEQ ID NO: 9113 - DNA, 33 bp, Artificial Sequence
  Synthesized
gctcagtatcatttgcctcgttttcctgctcag

SEQ ID NO: 9114 - DNA, 33 bp, Artificial Sequence
  Synthesized
gctcagtatcatttgcctcgtcctcatgctcag

SEQ ID NO: 9115 - DNA, 33 bp, Artificial Sequence
  Synthesized
gctcagtatcatcagatttctgctatggctcag

SEQ ID NO: 9116 - DNA, 33 bp, Artificial Sequence
  Synthesized
gctcagtatcattctatgtcttttatggctcag

SEQ ID NO: 9117 - DNA, 33 bp, Artificial Sequence
  Synthesized
gctcagtatcatactttgactcgtcaggctcag

SEQ ID NO: 9118 - DNA, 33 bp, Artificial Sequence
  Synthesized
gctcagtatatttctggtcgtcaggttgctcag

SEQ ID NO: 9119 - DNA, 33 bp, Artificial Sequence
  Synthesized
gctcagtataagggtggttctgctatggctcag

SEQ ID NO: 9120 - DNA, 33 bp, Artificial Sequence
  Synthesized
gctcagtataagggtatttctgctatggctcag

SEQ ID NO: 9121 - DNA, 33 bp, Artificial Sequence
  Synthesized
gctcagtataagatgtctgagtctaaggctcag

SEQ ID NO: 9122 - DNA, 33 bp, Artificial Sequence
  Synthesized
gctcagtataagaatttgcatactaatgctcag

SEQ ID NO: 9123 - DNA, 33 bp, Artificial Sequence
  Synthesized
gctcagtataagaattatggttcttctgctcag

SEQ ID NO: 9124 - DNA, 33 bp, Artificial Sequence
  Synthesized
gctcagtataagacttcttctcagtctgctcag

SEQ ID NO: 9125 - DNA, 33 bp, Artificial Sequence
  Synthesized
gctcagtatttggcttcttctgattctgctcag

SEQ ID NO: 9126 - DNA, 33 bp, Artificial Sequence
  Synthesized
gctcagtatttgggtggttctaattatgctcag

SEQ ID NO: 9127 - DNA, 33 bp, Artificial Sequence
  Synthesized
gctcagtatttgttgaatcatgatgttgctcag

SEQ ID NO: 9128 - DNA, 33 bp, Artificial Sequence
  Synthesized
gctcagtatttgttgcctgaggatcatgctcag

SEQ ID NO: 9129 - DNA, 33 bp, Artificial Sequence
  Synthesized
gctcagtatttgcctacttctgctatggctcag

SEQ ID NO: 9130 - DNA, 33 bp, Artificial Sequence
  Synthesized
gctcagtatttgtcttctaaggctgctgctcag

SEQ ID NO: 9131 - DNA, 33 bp, Artificial Sequence
  Synthesized
gctcagtatttgactgatgctttgaatgctcag

SEQ ID NO: 9132 - DNA, 33 bp, Artificial Sequence
  Synthesized
gctcagtatttgactggtatggctaatgctcag

SEQ ID NO: 9133 - DNA, 33 bp, Artificial Sequence
  Synthesized
gctcagtatttgactaagtctttggatgctcag

SEQ ID NO: 9134 - DNA, 33 bp, Artificial Sequence
  Synthesized
gctcagtatttgtattcttcttttatggctcag

SEQ ID NO: 9135 - DNA, 33 bp, Artificial Sequence
  Synthesized
gctcagtatatgttgcctcgtgatattgctcag

SEQ ID NO: 9136 - DNA, 33 bp, Artificial Sequence
  Synthesized
gctcagtataatggtactcgtaagcctgctcag

SEQ ID NO: 9137 - DNA, 33 bp, Artificial Sequence
  Synthesized
gctcagtataatcatactcgtgattttgctcag

SEQ ID NO: 9138 - DNA, 33 bp, Artificial Sequence
  Synthesized
gctcagtataatcatactcgttattctgctcag

SEQ ID NO: 9139 - DNA, 33 bp, Artificial Sequence
  Synthesized
gctcagtataatttgcctcgtcgtgatgctcag

SEQ ID NO: 9140 - DNA, 33 bp, Artificial Sequence
  Synthesized
gctcagtataataatactgcttattttgctcag

SEQ ID NO: 9141 - DNA, 33 bp, Artificial Sequence
  Synthesized
gctcagtataataatactgatggtcgtgctcag

SEQ ID NO: 9142 - DNA, 33 bp, Artificial Sequence
  Synthesized
gctcagtataataatacttttggtcgtgctcag

SEQ ID NO: 9143 - DNA, 33 bp, Artificial Sequence
  Synthesized
gctcagtataataatactggtttttttgctcag

SEQ ID NO: 9144 - DNA, 33 bp, Artificial Sequence
  Synthesized
gctcagtataataatactaagcatcgtgctcag

SEQ ID NO: 9145 - DNA, 33 bp, Artificial Sequence
  Synthesized
gctcagtataataatactaagtatcgtgctcag

SEQ ID NO: 9146 - DNA, 33 bp, Artificial Sequence
  Synthesized
gctcagtataataatactatgtttggtgctcag

SEQ ID NO: 9147 - DNA, 33 bp, Artificial Sequence
  Synthesized
gctcagtataataatactatgtttcatgctcag

SEQ ID NO: 9148 - DNA, 33 bp, Artificial Sequence
  Synthesized
gctcagtataataatactaatcctgaggctcag

SEQ ID NO: 9149 - DNA, 33 bp, Artificial Sequence
  Synthesized
gctcagtataataatactcctgctcatgctcag

SEQ ID NO: 9150 - DNA, 33 bp, Artificial Sequence
  Synthesized
gctcagtataataatactcctggttctgctcag

SEQ ID NO: 9151 - DNA, 33 bp, Artificial Sequence
  Synthesized
gctcagtataataatactcgtcatggtgctcag

SEQ ID NO: 9152 - DNA, 33 bp, Artificial Sequence
  Synthesized
gctcagtataataatactcgtcatcctgctcag

SEQ ID NO: 9153 - DNA, 33 bp, Artificial Sequence
  Synthesized
gctcagtataataatactcgtaaggctgctcag

SEQ ID NO: 9154 - DNA, 33 bp, Artificial Sequence
  Synthesized
gctcagtataataatactacttttgctgctcag

SEQ ID NO: 9155 - DNA, 33 bp, Artificial Sequence
  Synthesized
gctcagtataataatactactcctgttgctcag

SEQ ID NO: 9156 - DNA, 33 bp, Artificial Sequence
  Synthesized
gctcagtataataatactgttattcctgctcag

SEQ ID NO: 9157 - DNA, 33 bp, Artificial Sequence
  Synthesized
gctcagtataatcctggtcgtggttctgctcag

SEQ ID NO: 9158 - DNA, 33 bp, Artificial Sequence
  Synthesized
gctcagtataatcctcctactaattctgctcag

SEQ ID NO: 9159 - DNA, 33 bp, Artificial Sequence
  Synthesized
gctcagtataatcctactcgttttcatgctcag

SEQ ID NO: 9160 - DNA, 33 bp, Artificial Sequence
  Synthesized
gctcagtataatcctgttgatcgttctgctcag

SEQ ID NO: 9161 - DNA, 33 bp, Artificial Sequence
  Synthesized
gctcagtataatcctgtttttcgttctgctcag

SEQ ID NO: 9162 - DNA, 33 bp, Artificial Sequence
  Synthesized
gctcagtataatcctgttaagcgttctgctcag

SEQ ID NO: 9163 - DNA, 33 bp, Artificial Sequence
  Synthesized
gctcagtataatcctgttcctcgttctgctcag

SEQ ID NO: 9164 - DNA, 33 bp, Artificial Sequence
  Synthesized
gctcagtataatcctgttcgtcgttctgctcag

SEQ ID NO: 9165 - DNA, 33 bp, Artificial Sequence
  Synthesized
gctcagtataatcctgttgttcgttctgctcag

SEQ ID NO: 9166 - DNA, 33 bp, Artificial Sequence
  Synthesized
gctcagtataatcagaaggtttattctgctcag

SEQ ID NO: 9167 - DNA, 33 bp, Artificial Sequence
  Synthesized
gctcagtataatcagactcgttatcgtgctcag

SEQ ID NO: 9168 - DNA, 33 bp, Artificial Sequence
  Synthesized
gctcagtataatcgtactcgtggtcctgctcag

SEQ ID NO: 9169 - DNA, 33 bp, Artificial Sequence
  Synthesized
gctcagtataattctttgtcttctaatgctcag

SEQ ID NO: 9170 - DNA, 33 bp, Artificial Sequence
  Synthesized
gctcagtataattctttgtctactcatgctcag

SEQ ID NO: 9171 - DNA, 33 bp, Artificial Sequence
  Synthesized
gctcagtataatgttactcgtgctcctgctcag

SEQ ID NO: 9172 - DNA, 33 bp, Artificial Sequence
  Synthesized
gctcagtataattatactcgtcatttggctcag

SEQ ID NO: 9173 - DNA, 33 bp, Artificial Sequence
  Synthesized
gctcagtataattatactcgtaagactgctcag

SEQ ID NO: 9174 - DNA, 33 bp, Artificial Sequence
  Synthesized
gctcagtataattatactcgtcgtcatgctcag

SEQ ID NO: 9175 - DNA, 33 bp, Artificial Sequence
  Synthesized
gctcagtataattatactcgttcttttgctcag

SEQ ID NO: 9176 - DNA, 33 bp, Artificial Sequence
  Synthesized
gctcagtatcctgctaaggctttgtctgctcag

SEQ ID NO: 9177 - DNA, 33 bp, Artificial Sequence
  Synthesized
gctcagtatcctgcttctggtgctgctgctcag

SEQ ID NO: 9178 - DNA, 33 bp, Artificial Sequence
  Synthesized
gctcagtatcctggtggtaatgttactgctcag

SEQ ID NO: 9179 - DNA, 33 bp, Artificial Sequence
  Synthesized
gctcagtatcctcatgtttctgctatggctcag

SEQ ID NO: 9180 - DNA, 33 bp, Artificial Sequence
  Synthesized
gctcagtatcctcattattctgctatggctcag

SEQ ID NO: 9181 - DNA, 33 bp, Artificial Sequence
  Synthesized
gctcagtatcctttgcctcataatcatgctcag

SEQ ID NO: 9182 - DNA, 33 bp, Artificial Sequence
  Synthesized
gctcagtatcctttgcctcgtattaatgctcag

SEQ ID NO: 9183 - DNA, 33 bp, Artificial Sequence
  Synthesized
gctcagtatcctaatgagaatttgaaggctcag

SEQ ID NO: 9184 - DNA, 33 bp, Artificial Sequence
  Synthesized
gctcagtatcctaattctgatcagcgtgctcag

SEQ ID NO: 9185 - DNA, 33 bp, Artificial Sequence
  Synthesized
gctcagtatcctcaggagcgtgttgatgctcag

SEQ ID NO: 9186 - DNA, 33 bp, Artificial Sequence
  Synthesized
gctcagtatcctcagtctcatgatcgtgctcag

SEQ ID NO: 9187 - DNA, 33 bp, Artificial Sequence
  Synthesized
gctcagtatcctcgtgagaagtctgttgctcag

SEQ ID NO: 9188 - DNA, 33 bp, Artificial Sequence
  Synthesized
gctcagtatcctcgtaattctggtgatgctcag

SEQ ID NO: 9189 - DNA, 33 bp, Artificial Sequence
  Synthesized
gctcagtatcctactaatcgtatttctgctcag

SEQ ID NO: 9190 - DNA, 33 bp, Artificial Sequence
  Synthesized
gctcagtatccttataagactacttctgctcag

SEQ ID NO: 9191 - DNA, 33 bp, Artificial Sequence
  Synthesized
gctcagtatccttatatgtctgctatggctcag

SEQ ID NO: 9192 - DNA, 33 bp, Artificial Sequence
  Synthesized
gctcagtatcaggctgtttctcagcatgctcag

SEQ ID NO: 9193 - DNA, 33 bp, Artificial Sequence
  Synthesized
gctcagtatcagaagttggctggtatggctcag

SEQ ID NO: 9194 - DNA, 33 bp, Artificial Sequence
  Synthesized
gctcagtatcagttgcgtaatccttctgctcag

SEQ ID NO: 9195 - DNA, 33 bp, Artificial Sequence
  Synthesized
gctcagtatcagcgttctaatactgatgctcag

SEQ ID NO: 9196 - DNA, 33 bp, Artificial Sequence
  Synthesized
gctcagtatcgttttggttctgctatggctcag

SEQ ID NO: 9197 - DNA, 33 bp, Artificial Sequence
  Synthesized
gctcagtatcgtttgcctcgttttcctgctcag

SEQ ID NO: 9198 - DNA, 33 bp, Artificial Sequence
  Synthesized
gctcagtatcgtttgcctcgtatgaaggctcag

SEQ ID NO: 9199 - DNA, 33 bp, Artificial Sequence
  Synthesized
gctcagtatcgtaatactcagacttctgctcag

SEQ ID NO: 9200 - DNA, 33 bp, Artificial Sequence
  Synthesized
gctcagtatcgtcagttgtctgctatggctcag

SEQ ID NO: 9201 - DNA, 33 bp, Artificial Sequence
  Synthesized
gctcagtatcgtcagaatcgtgttgaggctcag

SEQ ID NO: 9202 - DNA, 33 bp, Artificial Sequence
  Synthesized
gctcagtatcgtcagtcttctgttaatgctcag

SEQ ID NO: 9203 - DNA, 33 bp, Artificial Sequence
  Synthesized
gctcagtatcgttctggttcttttatggctcag

SEQ ID NO: 9204 - DNA, 33 bp, Artificial Sequence
  Synthesized
gctcagtatcgtactgctggtcctgctgctcag

SEQ ID NO: 9205 - DNA, 33 bp, Artificial Sequence
  Synthesized
gctcagtatcgttatttttctgctatggctcag

SEQ ID NO: 9206 - DNA, 33 bp, Artificial Sequence
  Synthesized
gctcagtattctgctgagttggctttggctcag

SEQ ID NO: 9207 - DNA, 33 bp, Artificial Sequence
  Synthesized
gctcagtattctggtcagttgtctcaggctcag

SEQ ID NO: 9208 - DNA, 33 bp, Artificial Sequence
  Synthesized
gctcagtattctttgcctggtcatgatgctcag

SEQ ID NO: 9209 - DNA, 33 bp, Artificial Sequence
  Synthesized
gctcagtattctaatttttcttttatggctcag

SEQ ID NO: 9210 - DNA, 33 bp, Artificial Sequence
  Synthesized
gctcagtattctcctggtttgcatcaggctcag

SEQ ID NO: 9211 - DNA, 33 bp, Artificial Sequence
  Synthesized
gctcagtattctccttctggtgttcgtgctcag

SEQ ID NO: 9212 - DNA, 33 bp, Artificial Sequence
  Synthesized
gctcagtattctcagaatttgcgtcaggctcag

SEQ ID NO: 9213 - DNA, 33 bp, Artificial Sequence
  Synthesized
gctcagtattctcgtactgatgctactgctcag

SEQ ID NO: 9214 - DNA, 33 bp, Artificial Sequence
  Synthesized
gctcagtattcttctgctggttctaatgctcag

SEQ ID NO: 9215 - DNA, 33 bp, Artificial Sequence
  Synthesized
gctcagtattcttctggtaaggctactgctcag

SEQ ID NO: 9216 - DNA, 33 bp, Artificial Sequence
  Synthesized
gctcagtattctactggtttgattaaggctcag

SEQ ID NO: 9217 - DNA, 33 bp, Artificial Sequence
  Synthesized
gctcagtattctgttggtcgtcctgatgctcag

SEQ ID NO: 9218 - DNA, 33 bp, Artificial Sequence
  Synthesized
gctcagtattctgttaataagtctcctgctcag

SEQ ID NO: 9219 - DNA, 33 bp, Artificial Sequence
  Synthesized
gctcagtatactggtcgtactatgattgctcag

SEQ ID NO: 9220 - DNA, 33 bp, Artificial Sequence
  Synthesized
gctcagtatactggttctcgtttgaatgctcag

SEQ ID NO: 9221 - DNA, 33 bp, Artificial Sequence
  Synthesized
gctcagtatactcatgctaatcctgaggctcag

SEQ ID NO: 9222 - DNA, 33 bp, Artificial Sequence
  Synthesized
gctcagtatactcattctactaagactgctcag

SEQ ID NO: 9223 - DNA, 33 bp, Artificial Sequence
  Synthesized
gctcagtatactattaatggtactcctgctcag

SEQ ID NO: 9224 - DNA, 33 bp, Artificial Sequence
  Synthesized
gctcagtatactttgcctcgttttcatgctcag

SEQ ID NO: 9225 - DNA, 33 bp, Artificial Sequence
  Synthesized
gctcagtatactttgcctcgtaagaaggctcag

SEQ ID NO: 9226 - DNA, 33 bp, Artificial Sequence
  Synthesized
gctcagtatacttctactttgaaggctgctcag

SEQ ID NO: 9227 - DNA, 33 bp, Artificial Sequence
  Synthesized
gctcagtatacttcttatttgtctaatgctcag

SEQ ID NO: 9228 - DNA, 33 bp, Artificial Sequence
  Synthesized
gctcagtatactactggtcctaagtctgctcag

SEQ ID NO: 9229 - DNA, 33 bp, Artificial Sequence
  Synthesized
gctcagtatgttgctaatcctaagttggctcag

SEQ ID NO: 9230 - DNA, 33 bp, Artificial Sequence
  Synthesized
gctcagtatgttggtaagaatatgtctgctcag

SEQ ID NO: 9231 - DNA, 33 bp, Artificial Sequence
  Synthesized
gctcagtatgttcattctgttcgtgctgctcag

SEQ ID NO: 9232 - DNA, 33 bp, Artificial Sequence
  Synthesized
gctcagtatgttttgcctcatggtgaggctcag

SEQ ID NO: 9233 - DNA, 33 bp, Artificial Sequence
  Synthesized
gctcagtatgttaatggttcttttatggctcag

SEQ ID NO: 9234 - DNA, 33 bp, Artificial Sequence
  Synthesized
gctcagtatgtttctaagtctgctatggctcag

SEQ ID NO: 9235 - DNA, 33 bp, Artificial Sequence
  Synthesized
gctcagtatgttgttggttcttttatggctcag

SEQ ID NO: 9236 - DNA, 33 bp, Artificial Sequence
  Synthesized
gctcagtattatgagacttctgctatggctcag

SEQ ID NO: 9237 - DNA, 33 bp, Artificial Sequence
  Synthesized
gctcagtattatttgcctcgtaataaggctcag

SEQ ID NO: 9238 - DNA, 33 bp, Artificial Sequence
  Synthesized
gatcagattggtcgtactactatgcctgctcag

SEQ ID NO: 9239 - DNA, 33 bp, Artificial Sequence
  Synthesized
gatcagcgtgcttctactatgtctcaggctcag

SEQ ID NO: 9240 - DNA, 33 bp, Artificial Sequence
  Synthesized
gatcagcgttcttctttgcagaatcaggctcag

SEQ ID NO: 9241 - DNA, 33 bp, Artificial Sequence
  Synthesized
gatcagactcctcgtgttcagcctgatgctcag

SEQ ID NO: 9242 - DNA, 33 bp, Artificial Sequence
  Synthesized
gatcagactcagtctaatattggtcgtgctcag

SEQ ID NO: 9243 - DNA, 33 bp, Artificial Sequence
  Synthesized
gatcagactcgtgcttctgctttgtctgctcag

SEQ ID NO: 9244 - DNA, 33 bp, Artificial Sequence
  Synthesized
gatcagactgttttgggtactaatatggctcag
